(19) United States
(12) Patent Application Publication
(10) Pub. No.: US 2025/0171795 A1
(43) Pub. Date: May 29, 2025

(54) TRANSGENIC PLANTS HAVING INCREASED BIOMASS

(71) Applicant: CERES, INC., Thousand Oaks, CA (US)

(72) Inventors: Chuan-Yin Wu, Newbury Park, CA (US); Han-Suk Kim, Camarillo, CA (US); Gerard Magpantay, Canoga Park, CA (US); Fasong Zhou, Fremont, CA (US); Julissa Sosa, Northridge, CA (US); Gregory Nadzan, Woodland Hills, CA (US); Roger I. Pennell, Malibu, CA (US); Mircea Achiriloaie, Thousand Oaks, CA (US); Wuyi Wang, Newbury Park, CA (US)

(21) Appl. No.: 19/017,387

(22) Filed: Jan. 10, 2025

Related U.S. Application Data
(62) Division of application No. 17/459,290, filed on Aug. 27, 2021.
Application No. 17/459,290 is a division of application No. 15/676,845, filed on Aug. 14, 2017, now Pat. No. 11,162,108.
Application No. 15/676,845 is a continuation of application No. 13/385,000, filed on Jun. 11, 2012, now abandoned.
(60) Provisional application No. 61/226,969, filed on Jul. 20, 2009.

(51) Int. Cl. C12N 15/82

(52) U.S. Cl. CPC C12N 15/8261; Y02A 40/146

(57) ABSTRACT

Methods and materials for modulating biomass levels in plants are disclosed. For example, nucleic acids encoding biomass-modulating polypeptides are disclosed as well as methods for using such nucleic acids to transform plant cells. Also disclosed are plants having increased biomass levels and plant products produced from plants having increased biomass levels.

### CROSS-REFERENCE TO RELATED APPLICATIONS

[0001] This application is a divisional application of U.S. patent application Ser. No. 17/459,290, filed Aug. 27, 2021, which is a divisional application of U.S. patent application Ser. No. 15/676,845, filed Aug. 14, 2017, now U.S. Pat. No. 11,162,108, which is a continuation of U.S. patent application Ser. No. 13/385,000, filed Jun. 11, 2012, now abandoned, which is a National Stage Entry of International Appl. No. PCT/US2010/042602, filed Jul. 20, 2010, which application claims the benefit of U.S. Provisional Application Ser. No. 61/226,969, filed on Jul. 20, 2009. The disclosures of the prior applications are herein incorporated by reference in their entireties.

### INCORPORATION OF SEQUENCE LISTING

[0002] The sequence listing that is contained in the file named “CRES054USCID3_ST26.xml”, which is 1,987,821 bytes (measured in MS-Windows®) and created on Jan. 7, 2025, is filed herewith by electronic submission and incorporated herein by reference.

### TECHNICAL FIELD

[0003] This document relates to methods and materials involved in modulating biomass levels in plants. For example, this document provides plants having increased biomass levels as well as materials and methods for making plants and plant products having increased biomass levels.

### BACKGROUND

[0004] The present invention relates to methods of increasing biomass in plants and plants generated thereby. Plants having increased and/or improved biomass are useful for agriculture, horticulture, biomass to energy conversion, paper production, plant product production, and other industries. In particular, there is a need for increases in biomass for dedicated energy crops such as Panicum virgatum L. (switchgrass), Miscanthus x gigantus (miscanthus), Sorghum sp., and Saccharum sp. (sugar cane). Throughout human history, access to plant biomass for both food and fuel has been essential to maintaining and increasing population levels. Scientists are continually striving to improve biomass in agricultural crops. The large amount of research related to increasing plant biomass, particularly for dedicated energy crops, indicates the level of importance placed on providing sustainable sources of energy for the population. The urgency of developing sustainable and stable sources of plant biomass for energy is underscored by current events, such as rising oil prices. The amount of biomass produced by plants is a quantitative trait affected by a number of biochemical pathways. There is a need for molecular genetic approaches to more rapidly produce plants having increased biomass. There is also a need to produce plant species that grow more efficiently and produce more biomass in various geographic and/or climatic environments. It would be desirable for such approaches to be applicable to multiple plant species (Zhang et al., Plant Physiol. 135: 615-621 (2004)). Despite some progress in molecular genetic approaches, there is also a need to identify specific genes and/or sequences that can be used to effectively increase biomass in plants.

### SUMMARY

[0005] This document provides methods and materials related to plants having modulated levels of biomass. For example, this document provides transgenic plants and plant cells having increased levels of biomass, nucleic acids used to generate transgenic plants and plant cells having increased levels of biomass, methods for making plants having increased levels of biomass, and methods for making plant cells that can be used to generate plants having increased levels of biomass. Such plants and plant cells can be grown to produce, for example, plants having increased height, increased tiller number, or increased dry weight. Plants having increased biomass levels may be useful to produce biomass for food and feed, which may benefit both humans and animals. Plants having increased biomass levels may be useful in converting such biomass to a liquid fuel (e.g., ethanol), or other chemicals, or may be useful as a thermochemical fuel.

[0006] Methods of producing a plant having increased biomass are provided herein. In one aspect, a method comprises growing a plant cell comprising an exogenous nucleic acid. The exogenous nucleic acid comprises a regulatory region operably linked to a nucleotide sequence encoding a polypeptide. The Hidden Markov Model (HMM) bit score of the amino acid sequence of the polypeptide is greater than about 130, 340, 530, 120, 635, 65, 100, 480, 145, 280, or 1000 using an HMM generated from the amino acid sequences depicted in one of FIG. 1, 2, 3, 4, 5, 6, 7, 8, 9, 10, or 11, respectively. The plant has a difference in the level of biomass as compared to the corresponding level of biomass of a control plant that does not comprise the exogenous nucleic acid.

[0007] In another aspect, a method comprises growing a plant cell comprising an exogenous nucleic acid. The exogenous nucleic acid comprises a regulatory region operably linked to a nucleotide sequence encoding a polypeptide having 80 percent or greater sequence identity to an amino acid sequence set forth in SEQ ID NOs: 1, 2, 4, 6, 8, 10, 11, 12, 13, 14, 15, 16, 17, 18, 20, 22, 24, 25, 27, 29, 30, 32, 33, 34, 36, 37, 38, 39, 40, 41, 43, 45, 47, 49, 50, 51, 53, 54, 56, 58, 59, 61, 63, 64, 66, 68, 70, 71, 72, 74, 75, 77, 79, 81, 82, 84, 86, 87, 88, 90, 92, 94, 96, 98, 100, 102, 104, 106, 108, 110, 112, 114, 115, 117, 118, 120, 121, 122, 123, 125, 127, 129, 131, 132, 133, 135, 137, 139, 141, 142, 144, 145, 146, 147, 149, 151, 152, 153, 154, 155, 156, 158, 160, 162, 163, 164, 166, 168, 169, 171, 173, 174, 176, 178, 180, 182, 184, 185, 186, 188, 189, 190, 191, 193, 194, 195, 196, 198, 200, 202, 203, 204, 206, 207, 209, 210, 212, 214, 216, 218, 220, 222, 224, 226, 228, 230, 232, 234, 236, 238, 239, 241, 242, 243, 244, 245, 246, 247, 248, 249, 250, 251, 253, 255, 257, 259, 261, 263, 264, 266, 268, 269, 271, 273, 275, 276, 278, 279, 281, 282, 283, 285, 287, 289, 291, 292, 294, 295, 296, 297, 298, 299, 300, 302, 304, 305, 306, 308, 310, 311, 312, 314, 315, 317, 319, 320, 321, 323, 324, 326, 327, 329, 331, 332, 334, 336, 337, 338, 340, 342, 343, 345, 347, 349, 351, 353, 354, 356, 357, 359, 361, 363, 365, 367, 369, 371, 372, 374, 376, 378, 380, 382, 384, 386, 388, 390, 391, 393, 395, 397, 399, 401, 403, 405, 406, 407, 409, 411, 413, 415, 416, 417, 418, 420, 421, 422, 424, 426, 428, 429, 430, 431, 433, 435, 436, 437, 438, 439, 440, 442, 444, 446, 447, 448, 449, 450, 452, 453, 454, 455, 456, 457, 459, 461, 463, 464, 466, 467, 468, 470, 472, 474, 476, 478, 479, 480, 482, 483, 484, 486, 488, 490, 492, 493, 495, 497, 499, 500, 501, 502, 503, 504, 506, 508, 509, 511, 513, 515, 516, 517, 518, 519, 521, 523, 525, 526, 528, 529, 531, 532, 534, 536, 537, 539, 540, 541, 543, 545, 547, 549, 550, 551, 552, 554, 556, 558, 560, 562, 563, 565, 567, 569, 571, 573, 574, 575, 577, 579, 581, 583, 585, 587, 589, 591, 593, 595, 597, 598, 600, 602, 603, 604, 605, 606, 608, 609, 610, 611, 613, 615, 616, 618, 619, 620, 622, 623, 625, 627, 629, 630, 632, 633, 634, 636, 637, 638, 639, 641, 642, 643, 645, 647, 649, 651, 652, 653, 655, 657, 659, 660, 662, 664, 666, 667, 669, 670, 671, 672, 673, 674, 675, 676, 677, 689, 691, 693, 695, or 697. A plant produced from the plant cell can be used to generate a plant that has a difference in the level of biomass as compared to the corresponding level of biomass of a control plant that does not comprise the exogenous nucleic acid.

[0008] In another aspect, a method comprises growing a plant cell comprising an exogenous nucleic acid. The exogenous nucleic acid comprises a regulatory region operably linked to a nucleotide sequence having 80 percent or greater sequence identity to a nucleotide sequence, or a fragment thereof, set forth in SEQ ID NO: 3, 5, 7, 9, 19, 21, 23, 26, 28, 31, 35, 42, 44, 46, 48, 52, 55, 57, 60, 62, 65, 67, 69, 73, 76, 78, 80, 83, 85, 89, 91, 93, 95, 97, 99, 101, 103, 105, 107, 109, 111, 113, 116, 119, 124, 126, 128, 130, 134, 136, 138, 140, 143, 148, 150, 157, 159, 161, 165, 167, 170, 172, 175, 177, 179, 181, 183, 187, 192, 197, 199, 201, 205, 208, 211, 213, 215, 217, 219, 221, 223, 225, 227, 229, 231, 233, 235, 237, 240, 252, 254, 256, 258, 260, 262, 265, 267, 270, 272, 274, 277, 280, 284, 286, 288, 290, 293, 301, 303, 307, 309, 313, 316, 318, 322, 325, 328, 330, 333, 335, 339, 341, 344, 346, 348, 350, 352, 355, 358, 360, 362, 364, 366, 368, 370, 373, 375, 377, 379, 381, 383, 385, 387, 389, 392, 394, 396, 398, 400, 402, 404, 408, 410, 412, 414, 419, 423, 425, 427, 432, 434, 441, 443, 445, 451, 458, 460, 462, 465, 469, 471, 473, 475, 477, 481, 485, 487, 489, 491, 494, 496, 498, 505, 507, 510, 512, 514, 520, 522, 524, 527, 530, 533, 535, 538, 542, 544, 546, 548, 553, 555, 557, 559, 561, 564, 566, 568, 570, 572, 576, 578, 580, 582, 584, 586, 588, 590, 592, 594, 596, 599, 601, 607, 612, 614, 617, 621, 624, 626, 628, 631, 635, 640, 644, 646, 648, 650, 654, 656, 658, 661, 663, 665, 668, 678, 679, 680, 681, 682, 683, 684, 685, 686, 687, 688, 690, 692, 694, or 696. A plant produced from the plant cell has a difference in the level of biomass as compared to the corresponding level of biomass of a control plant that does not comprise the exogenous nucleic acid.

[0009] Methods of modulating the level of biomass in a plant are provided herein. In one aspect, a method comprises introducing into a plant cell an exogenous nucleic acid that comprises a regulatory region operably linked to a nucleotide sequence encoding a polypeptide. The HMM bit score of the amino acid sequence of the polypeptide is greater than about 130, 340, 530, 120, 635, 65, 100, 480, 145, 280, or 1000, using an HMM generated from the amino acid sequences depicted in one of FIG. 1, 2, 3, 4, 5, 6, 7, 8, 9, 10, or 11, respectively. A plant produced from the plant cell has a difference in the level of biomass as compared to the corresponding level of biomass of a control plant that does not comprise the exogenous nucleic acid.

[0010] In certain embodiments, the HMM score of the amino acid sequence of the polypeptide is greater than about 340, using an HMM generated from the amino acid sequences depicted in FIG. 2, wherein the polypeptide comprises a Dof domain zinc finger, having at least 60 percent or greater (e.g., 65, 70, 75, 80, 85, 90, 95, 99, or 100%) sequence identity to residues 130 to 192 of SEQ ID NO: 263, or Dof domain zinc fingers identified in the sequence listing.

[0011] In certain embodiments, the HMM score of the amino acid sequence of the polypeptide is greater than about 530, using an HMM generated from the amino acid sequences depicted in FIG. 3, wherein the polypeptide comprises a pytochelatin synthetase-like domain having at least 60 percent or greater (e.g., 65, 70, 75, 80, 85, 90, 95, 99, or 100%) sequence identity to residues 44 to 208 of SEQ ID NO: 117, or pytochelatin synthetase-like domains identified in the sequence listing.

[0012] In certain embodiments, the HMM score of the amino acid sequence of the polypeptide is greater than about 120, using an HMM generated from the amino acid sequences depicted in FIG. 4, wherein the polypeptide comprises a AP2 domain having at least 60 percent or greater (e.g., 65, 70, 75, 80, 85, 90, 95, 99, or 100%) sequence identity to residues 32 to 83 of SEQ ID NO: 1, or AP2 domains identified in the sequence listing.

[0013] In certain embodiments, the HMM score of the amino acid sequence of the polypeptide is greater than about 635, using an HMM generated from the amino acid sequences depicted in FIG. 5, wherein the polypeptide comprises a Aminotransferase class I and II domain having at least 60 percent or greater (e.g., 65, 70, 75, 80, 85, 90, 95, 99, or 100%) sequence identity to residues 88 to 453 of SEQ ID NO: 645, or Aminotransferase class I and II domains identified in the sequence listing.

[0014] In certain embodiments, the HMM score of the amino acid sequence of the polypeptide is greater than about 100, using an HMM generated from the amino acid sequences depicted in FIG. 7, wherein the polypeptide comprises a Myb-like DNA-binding domain having at least 60 percent or greater (e.g., 65, 70, 75, 80, 85, 90, 95, 99, or 100%) sequence identity to residues 13 to 62 of SEQ ID NO: 323, or Myb-like DNA-binding domains identified in the sequence listing.

[0015] In certain embodiments, the HMM score of the amino acid sequence of the polypeptide is greater than about 480, using an HMM generated from the amino acid sequences depicted in FIG. 8, wherein the polypeptide comprises an alpha/beta hydrolase fold domain having at least 60 percent or greater (e.g., 65, 70, 75, 80, 85, 90, 95, 99, or 100%) sequence identity to residues 35 to 257 of SEQ ID NO: 595.

[0016] In certain embodiments, the HMM score of the amino acid sequence of the polypeptide is greater than about 145, using an HMM generated from the amino acid sequences depicted in FIG. 9, wherein the polypeptide comprises a Rapid Alkalinization Factor (RALF) domain having at least 60 percent or greater (e.g., 65, 70, 75, 80, 85, 90, 95, 99, or 100%) sequence identity to residues 57 to 129 of SEQ ID NO: 77, or RALF domains identified in the sequence listing.

[0017] In certain embodiments, the HMM score of the amino acid sequence of the polypeptide is greater than about 280, using an HMM generated from the amino acid sequences depicted in FIG. 10, wherein the polypeptide comprises a protein of unknown function (DUF640) domain having at least 60 percent or greater (e.g., 65, 70, 75, 80, 85, 90, 95, 99, or 100%) sequence identity to residues 19 to 152 of SEQ ID NO: 209, or DUF640 domains identified in the sequence listing.

[0018] In certain embodiments, the HMM score of the amino acid sequence of the polypeptide is greater than about 1000, using an HMM generated from the amino acid sequences depicted in FIG. 11, wherein the polypeptide comprises a POT family domain having at least 60 percent or greater (e.g., 65, 70, 75, 80, 85, 90, 95, 99, or 100%) sequence identity to residues 100 to 509 of SEQ ID NO: 426, or POT family domains identified in the sequence listing.

[0019] In another aspect, a method comprises introducing into a plant cell an exogenous nucleic acid that comprises a regulatory region operably linked to a nucleotide sequence encoding a polypeptide having 80 percent or greater sequence identity to an amino acid sequence set forth in SEQ ID NO: 1, 2, 4, 6, 8, 10, 11, 12, 13, 14, 15, 16, 17, 18, 20, 22, 24, 25, 27, 29, 30, 32, 33, 34, 36, 37, 38, 39, 40, 41, 43, 45, 47, 49, 50, 51, 53, 54, 56, 58, 59, 61, 63, 64, 66, 68, 70, 71, 72, 74, 75, 77, 79, 81, 82, 84, 86, 87, 88, 90, 92, 94, 96, 98, 100, 102, 104, 106, 108, 110, 112, 114, 115, 117, 118, 120, 121, 122, 123, 125, 127, 129, 131, 132, 133, 135, 137, 139, 141, 142, 144, 145, 146, 147, 149, 151, 152, 153, 154, 155, 156, 158, 160, 162, 163, 164, 166, 168, 169, 171, 173, 174, 176, 178, 180, 182, 184, 185, 186, 188, 189, 190, 191, 193, 194, 195, 196, 198, 200, 202, 203, 204, 206, 207, 209, 210, 212, 214, 216, 218, 220, 222, 224, 226, 228, 230, 232, 234, 236, 238, 239, 241, 242, 243, 244, 245, 246, 247, 248, 249, 250, 251, 253, 255, 257, 259, 261, 263, 264, 266, 268, 269, 271, 273, 275, 276, 278, 279, 281, 282, 283, 285, 287, 289, 291, 292, 294, 295, 296, 297, 298, 299, 300, 302, 304, 305, 306, 308, 310, 311, 312, 314, 315, 317, 319, 320, 321, 323, 324, 326, 327, 329, 331, 332, 334, 336, 337, 338, 340, 342, 343, 345, 347, 349, 351, 353, 354, 356, 357, 359, 361, 363, 365, 367, 369, 371, 372, 374, 376, 378, 380, 382, 384, 386, 388, 390, 391, 393, 395, 397, 399, 401, 403, 405, 406, 407, 409, 411, 413, 415, 416, 417, 418, 420, 421, 422, 424, 426, 428, 429, 430, 431, 433, 435, 436, 437, 438, 439, 440, 442, 444, 446, 447, 448, 449, 450, 452, 453, 454, 455, 456, 457, 459, 461, 463, 464, 466, 467, 468, 470, 472, 474, 476, 478, 479, 480, 482, 483, 484, 486, 488, 490, 492, 493, 495, 497, 499, 500, 501, 502, 503, 504, 506, 508, 509, 511, 513, 515, 516, 517, 518, 519, 521, 523, 525, 526, 528, 529, 531, 532, 534, 536, 537, 539, 540, 541, 543, 545, 547, 549, 550, 551, 552, 554, 556, 558, 560, 562, 563, 565, 567, 569, 571, 573, 574, 575, 577, 579, 581, 583, 585, 587, 589, 591, 593, 595, 597, 598, 600, 602, 603, 604, 605, 606, 608, 609, 610, 611, 613, 615, 616, 618, 619, 620, 622, 623, 625, 627, 629, 630, 632, 633, 634, 636, 637, 638, 639, 641, 642, 643, 645, 647, 649, 651, 652, 653, 655, 657, 659, 660, 662, 664, 666, 667, 669, 670, 671, 672, 673, 674, 675, 676, 677, 689, 691, 693, 695, or 697. A plant produced from the plant cell has a difference in the level of biomass as compared to the corresponding level of biomass of a control plant that does not comprise the exogenous nucleic acid. The polypeptide in any of the above methods can have the amino acid sequence set forth in SEQ ID NO: 1, 2, 4, 6, 8, 10, 11, 12, 13, 14, 15, 16, 17, 18, 20, 22, 24, 25, 27, 29, 30, 32, 33, 34, 36, 37, 38, 39, 40, 41, 43, 45, 47, 49, 50, 51, 53, 54, 56, 58, 59, 61, 63, 64, 66, 68, 70, 71, 72, 74, 75, 77, 79, 81, 82, 84, 86, 87, 88, 90, 92, 94, 96, 98, 100, 102, 104, 106, 108, 110, 112, 114, 115, 117, 118, 120, 121, 122, 123, 125, 127, 129, 131, 132, 133, 135, 137, 139, 141, 142, 144, 145, 146, 147, 149, 151, 152, 153, 154, 155, 156, 158, 160, 162, 163, 164, 166, 168, 169, 171, 173, 174, 176, 178, 180, 182, 184, 185, 186, 188, 189, 190, 191, 193, 194, 195, 196, 198, 200, 202, 203, 204, 206, 207, 209, 210, 212, 214, 216, 218, 220, 222, 224, 226, 228, 230, 232, 234, 236, 238, 239, 241, 242, 243, 244, 245, 246, 247, 248, 249, 250, 251, 253, 255, 257, 259, 261, 263, 264, 266, 268, 269, 271, 273, 275, 276, 278, 279, 281, 282, 283, 285, 287, 289, 291, 292, 294, 295, 296, 297, 298, 299, 300, 302, 304, 305, 306, 308, 310, 311, 312, 314, 315, 317, 319, 320, 321, 323, 324, 326, 327, 329, 331, 332, 334, 336, 337, 338, 340, 342, 343, 345, 347, 349, 351, 353, 354, 356, 357, 359, 361, 363, 365, 367, 369, 371, 372, 374, 376, 378, 380, 382, 384, 386, 388, 390, 391, 393, 395, 397, 399, 401, 403, 405, 406, 407, 409, 411, 413, 415, 416, 417, 418, 420, 421, 422, 424, 426, 428, 429, 430, 431, 433, 435, 436, 437, 438, 439, 440, 442, 444, 446, 447, 448, 449, 450, 452, 453, 454, 455, 456, 457, 459, 461, 463, 464, 466, 467, 468, 470, 472, 474, 476, 478, 479, 480, 482, 483, 484, 486, 488, 490, 492, 493, 495, 497, 499, 500, 501, 502, 503, 504, 506, 508, 509, 511, 513, 515, 516, 517, 518, 519, 521, 523, 525, 526, 528, 529, 531, 532, 534, 536, 537, 539, 540, 541, 543, 545, 547, 549, 550, 551, 552, 554, 556, 558, 560, 562, 563, 565, 567, 569, 571, 573, 574, 575, 577, 579, 581, 583, 585, 587, 589, 591, 593, 595, 597, 598, 600, 602, 603, 604, 605, 606, 608, 609, 610, 611, 613, 615, 616, 618, 619, 620, 622, 623, 625, 627, 629, 630, 632, 633, 634, 636, 637, 638, 639, 641, 642, 643, 645, 647, 649, 651, 652, 653, 655, 657, 659, 660, 662, 664, 666, 667, 669, 670, 671, 672, 673, 674, 675, 676, 677, 689, 691, 693, 695, or 697.

[0020] In another aspect, a method comprises introducing into a plant cell an exogenous nucleic acid, that comprises a regulatory region operably linked to a nucleotide sequence having 80 percent or greater sequence identity to a nucleotide sequence set forth in SEQ ID NO: 3, 5, 7, 9, 19, 21, 23, 26, 28, 31, 35, 42, 44, 46, 48, 52, 55, 57, 60, 62, 65, 67, 69, 73, 76, 78, 80, 83, 85, 89, 91, 93, 95, 97, 99, 101, 103, 105, 107, 109, 111, 113, 116, 119, 124, 126, 128, 130, 134, 136, 138, 140, 143, 148, 150, 157, 159, 161, 165, 167, 170, 172, 175, 177, 179, 181, 183, 187, 192, 197, 199, 201, 205, 208, 211, 213, 215, 217, 219, 221, 223, 225, 227, 229, 231, 233, 235, 237, 240, 252, 254, 256, 258, 260, 262, 265, 267, 270, 272, 274, 277, 280, 284, 286, 288, 290, 293, 301, 303, 307, 309, 313, 316, 318, 322, 325, 328, 330, 333, 335, 339, 341, 344, 346, 348, 350, 352, 355, 358, 360, 362, 364, 366, 368, 370, 373, 375, 377, 379, 381, 383, 385, 387, 389, 392, 394, 396, 398, 400, 402, 404, 408, 410, 412, 414, 419, 423, 425, 427, 432, 434, 441, 443, 445, 451, 458, 460, 462, 465, 469, 471, 473, 475, 477, 481, 485, 487, 489, 491, 494, 496, 498, 505, 507, 510, 512, 514, 520, 522, 524, 527, 530, 533, 535, 538, 542, 544, 546, 548, 553, 555, 557, 559, 561, 564, 566, 568, 570, 572, 576, 578, 580, 582, 584, 586, 588, 590, 592, 594, 596, 599, 601, 607, 612, 614, 617, 621, 624, 626, 628, 631, 635, 640, 644, 646, 648, 650, 654, 656, 658, 661, 663, 665, 668, 678, 679, 680, 681, 682, 683, 684, 685, 686, 687, 688, 690, 692, 694, or 696, or a fragment thereof. A plant produced from the plant cell has a difference in the level of biomass as compared to the corresponding level of biomass of a control plant that does not comprise the exogenous nucleic acid.

[0021] Plant cells comprising an exogenous nucleic acid are provided herein. In one aspect, the exogenous nucleic acid comprises a regulatory region operably linked to a nucleotide sequence encoding a polypeptide. The HMM bit score of the amino acid sequence of the polypeptide is greater than about 130, 340, 530, 120, 635, 65, 100, 480, 145, 280, or 1000, using an HMM based on the amino acid sequences depicted in one of FIG. 1, 2, 3, 4, 5, 6, 7, 8, 9, 10, or 11. The plant has a difference in the level of biomass as compared to the corresponding level of biomass of a control plant that does not comprise the exogenous nucleic acid. In another aspect, the exogenous nucleic acid comprises a regulatory region operably linked to a nucleotide sequence encoding a polypeptide having 80 percent or greater sequence identity to an amino acid sequence selected from the group consisting of SEQ ID NO: 1, 2, 4, 6, 8, 10, 11, 12, 13, 14, 15, 16, 17, 18, 20, 22, 24, 25, 27, 29, 30, 32, 33, 34, 36, 37, 38, 39, 40, 41, 43, 45, 47, 49, 50, 51, 53, 54, 56, 58, 59, 61, 63, 64, 66, 68, 70, 71, 72, 74, 75, 77, 79, 81, 82, 84, 86, 87, 88, 90, 92, 94, 96, 98, 100, 102, 104, 106, 108, 110, 112, 114, 115, 117, 118, 120, 121, 122, 123, 125, 127, 129, 131, 132, 133, 135, 137, 139, 141, 142, 144, 145, 146, 147, 149, 151, 152, 153, 154, 155, 156, 158, 160, 162, 163, 164, 166, 168, 169, 171, 173, 174, 176, 178, 180, 182, 184, 185, 186, 188, 189, 190, 191, 193, 194, 195, 196, 198, 200, 202, 203, 204, 206, 207, 209, 210, 212, 214, 216, 218, 220, 222, 224, 226, 228, 230, 232, 234, 236, 238, 239, 241, 242, 243, 244, 245, 246, 247, 248, 249, 250, 251, 253, 255, 257, 259, 261, 263, 264, 266, 268, 269, 271, 273, 275, 276, 278, 279, 281, 282, 283, 285, 287, 289, 291, 292, 294, 295, 296, 297, 298, 299, 300, 302, 304, 305, 306, 308, 310, 311, 312, 314, 315, 317, 319, 320, 321, 323, 324, 326, 327, 329, 331, 332, 334, 336, 337, 338, 340, 342, 343, 345, 347, 349, 351, 353, 354, 356, 357, 359, 361, 363, 365, 367, 369, 371, 372, 374, 376, 378, 380, 382, 384, 386, 388, 390, 391, 393, 395, 397, 399, 401, 403, 405, 406, 407, 409, 411, 413, 415, 416, 417, 418, 420, 421, 422, 424, 426, 428, 429, 430, 431, 433, 435, 436, 437, 438, 439, 440, 442, 444, 446, 447, 448, 449, 450, 452, 453, 454, 455, 456, 457, 459, 461, 463, 464, 466, 467, 468, 470, 472, 474, 476, 478, 479, 480, 482, 483, 484, 486, 488, 490, 492, 493, 495, 497, 499, 500, 501, 502, 503, 504, 506, 508, 509, 511, 513, 515, 516, 517, 518, 519, 521, 523, 525, 526, 528, 529, 531, 532, 534, 536, 537, 539, 540, 541, 543, 545, 547, 549, 550, 551, 552, 554, 556, 558, 560, 562, 563, 565, 567, 569, 571, 573, 574, 575, 577, 579, 581, 583, 585, 587, 589, 591, 593, 595, 597, 598, 600, 602, 603, 604, 605, 606, 608, 609, 610, 611, 613, 615, 616, 618, 619, 620, 622, 623, 625, 627, 629, 630, 632, 633, 634, 636, 637, 638, 639, 641, 642, 643, 645, 647, 649, 651, 652, 653, 655, 657, 659, 660, 662, 664, 666, 667, 669, 670, 671, 672, 673, 674, 675, 676, 677, 689, 691, 693, 695, or 697. A plant produced from the plant cell has a difference in the level of biomass as compared to the corresponding level of biomass of a control plant that does not comprise the exogenous nucleic acid. In another aspect, the exogenous nucleic acid comprises a regulatory region operably linked to a nucleotide sequence having 80 percent or greater sequence identity to a nucleotide sequence selected from the group consisting of SEQ ID NO: 3, 5, 7, 9, 19, 21, 23, 26, 28, 31, 35, 42, 44, 46, 48, 52, 55, 57, 60, 62, 65, 67, 69, 73, 76, 78, 80, 83, 85, 89, 91, 93, 95, 97, 99, 101, 103, 105, 107, 109, 111, 113, 116, 119, 124, 126, 128, 130, 134, 136, 138, 140, 143, 148, 150, 157, 159, 161, 165, 167, 170, 172, 175, 177, 179, 181, 183, 187, 192, 197, 199, 201, 205, 208, 211, 213, 215, 217, 219, 221, 223, 225, 227, 229, 231, 233, 235, 237, 240, 252, 254, 256, 258, 260, 262, 265, 267, 270, 272, 274, 277, 280, 284, 286, 288, 290, 293, 301, 303, 307, 309, 313, 316, 318, 322, 325, 328, 330, 333, 335, 339, 341, 344, 346, 348, 350, 352, 355, 358, 360, 362, 364, 366, 368, 370, 373, 375, 377, 379, 381, 383, 385, 387, 389, 392, 394, 396, 398, 400, 402, 404, 408, 410, 412, 414, 419, 423, 425, 427, 432, 434, 441, 443, 445, 451, 458, 460, 462, 465, 469, 471, 473, 475, 477, 481, 485, 487, 489, 491, 494, 496, 498, 505, 507, 510, 512, 514, 520, 522, 524, 527, 530, 533, 535, 538, 542, 544, 546, 548, 553, 555, 557, 559, 561, 564, 566, 568, 570, 572, 576, 578, 580, 582, 584, 586, 588, 590, 592, 594, 596, 599, 601, 607, 612, 614, 617, 621, 624, 626, 628, 631, 635, 640, 644, 646, 648, 650, 654, 656, 658, 661, 663, 665, 668, 678, 679, 680, 681, 682, 683, 684, 685, 686, 687, 688, 690, 692, 694, or 696, or a fragment thereof. A plant produced from the plant cell has a difference in the level of biomass as compared to the corresponding level of biomass of a control plant that does not comprise the exogenous nucleic acid. A transgenic plant comprising such a plant cell is also provided. Also provided is a plant biomass or seed product. The product comprises vegetative or embryonic tissue from a transgenic plant described herein.

[0022] Isolated nucleic acids are also provided. In one aspect, an isolated nucleic acid comprises a nucleotide sequence having 80% or greater sequence identity to the nucleotide sequence set forth in SEQ ID NO: 3, 5, 7, 9, 19, 21, 23, 26, 28, 31, 35, 42, 44, 46, 48, 52, 55, 57, 60, 62, 65, 67, 69, 73, 76, 78, 80, 83, 85, 89, 91, 93, 95, 97, 99, 101, 103, 105, 107, 109, 111, 113, 116, 119, 124, 126, 128, 130, 134, 136, 138, 140, 143, 148, 150, 157, 159, 161, 165, 167, 170, 172, 175, 177, 179, 181, 183, 187, 192, 197, 199, 201, 205, 208, 211, 213, 215, 217, 219, 221, 223, 225, 227, 229, 231, 233, 235, 237, 240, 252, 254, 256, 258, 260, 262, 265, 267, 270, 272, 274, 277, 280, 284, 286, 288, 290, 293, 301, 303, 307, 309, 313, 316, 318, 322, 325, 328, 330, 333, 335, 339, 341, 344, 346, 348, 350, 352, 355, 358, 360, 362, 364, 366, 368, 370, 373, 375, 377, 379, 381, 383, 385, 387, 389, 392, 394, 396, 398, 400, 402, 404, 408, 410, 412, 414, 419, 423, 425, 427, 432, 434, 441, 443, 445, 451, 458, 460, 462, 465, 469, 471, 473, 475, 477, 481, 485, 487, 489, 491, 494, 496, 498, 505, 507, 510, 512, 514, 520, 522, 524, 527, 530, 533, 535, 538, 542, 544, 546, 548, 553, 555, 557, 559, 561, 564, 566, 568, 570, 572, 576, 578, 580, 582, 584, 586, 588, 590, 592, 594, 596, 599, 601, 607, 612, 614, 617, 621, 624, 626, 628, 631, 635, 640, 644, 646, 648, 650, 654, 656, 658, 661, 663, 665, 668, 678, 679, 680, 681, 682, 683, 684, 685, 686, 687, 688, 690, 692, 694, or 696. In another aspect, an isolated nucleic acid comprises a nucleotide sequence encoding a polypeptide having 80% or greater sequence identity to the amino acid sequence set forth in SEQ ID NO: 1, 2, 4, 6, 8, 10, 11, 12, 13, 14, 15, 16, 17, 18, 20, 22, 24, 25, 27, 29, 30, 32, 33, 34, 36, 37, 38, 39, 40, 41, 43, 45, 47, 49, 50, 51, 53, 54, 56, 58, 59, 61, 63, 64, 66, 68, 70, 71, 72, 74, 75, 77, 79, 81, 82, 84, 86, 87, 88, 90, 92, 94, 96, 98, 100, 102, 104, 106, 108, 110, 112, 114, 115, 117, 118, 120, 121, 122, 123, 125, 127, 129, 131, 132, 133, 135, 137, 139, 141, 142, 144, 145, 146, 147, 149, 151, 152, 153, 154, 155, 156, 158, 160, 162, 163, 164, 166, 168, 169, 171, 173, 174, 176, 178, 180, 182, 184, 185, 186, 188, 189, 190, 191, 193, 194, 195, 196, 198, 200, 202, 203, 204, 206, 207, 209, 210, 212, 214, 216, 218, 220, 222, 224, 226, 228, 230, 232, 234, 236, 238, 239, 241, 242, 243, 244, 245, 246, 247, 248, 249, 250, 251, 253, 255, 257, 259, 261, 263, 264, 266, 268, 269, 271, 273, 275, 276, 278, 279, 281, 282, 283, 285, 287, 289, 291, 292, 294, 295, 296, 297, 298, 299, 300, 302, 304, 305, 306, 308, 310, 311, 312, 314, 315, 317, 319, 320, 321, 323, 324, 326, 327, 329, 331, 332, 334, 336, 337, 338, 340, 342, 343, 345, 347, 349, 351, 353, 354, 356, 357, 359, 361, 363, 365, 367, 369, 371, 372, 374, 376, 378, 380, 382, 384, 386, 388, 390, 391, 393, 395, 397, 399, 401, 403, 405, 406, 407, 409, 411, 413, 415, 416, 417, 418, 420, 421, 422, 424, 426, 428, 429, 430, 431, 433, 435, 436, 437, 438, 439, 440, 442, 444, 446, 447, 448, 449, 450, 452, 453, 454, 455, 456, 457, 459, 461, 463, 464, 466, 467, 468, 470, 472, 474, 476, 478, 479, 480, 482, 483, 484, 486, 488, 490, 492, 493, 495, 497, 499, 500, 501, 502, 503, 504, 506, 508, 509, 511, 513, 515, 516, 517, 518, 519, 521, 523, 525, 526, 528, 529, 531, 532, 534, 536, 537, 539, 540, 541, 543, 545, 547, 549, 550, 551, 552, 554, 556, 558, 560, 562, 563, 565, 567, 569, 571, 573, 574, 575, 577, 579, 581, 583, 585, 587, 589, 591, 593, 595, 597, 598, 600, 602, 603, 604, 605, 606, 608, 609, 610, 611, 613, 615, 616, 618, 619, 620, 622, 623, 625, 627, 629, 630, 632, 633, 634, 636, 637, 638, 639, 641, 642, 643, 645, 647, 649, 651, 652, 653, 655, 657, 659, 660, 662, 664, 666, 667, 669, 670, 671, 672, 673, 674, 675, 676, 677, 689, 691, 693, 695, or 697.

[0023] In another aspect, methods of identifying a genetic polymorphism associated with variation in the level of biomass are provided. The methods include providing a population of plants, and determining whether one or more genetic polymorphisms in the population are genetically linked to the locus for a polypeptide selected from the group consisting of the polypeptides depicted in FIGS. 1-11 and functional homologs thereof. The correlation between variation in the level of biomass in a tissue in plants of the population and the presence of the one or more genetic polymorphisms in plants of the population is measured, thereby permitting identification of whether or not the one or more genetic polymorphisms are associated with such variation.

[0024] In another aspect, methods of making a plant line are provided. The methods include determining whether one or more genetic polymorphisms in a population of plants is associated with the locus for one or more of the polypeptides depicted in FIGS. 1-11 and functional homologs of such polypeptides. One or more plants in the population is identified in which the presence of at least one of the genetic polymorphism(s) is associated with variation in a biomass trait. The above-described steps can be performed in either order. One or more of the identified plants is then crossed with itself or a different plant to produce seed, and at least one progeny plant grown from such seed is crossed with itself or a different plant. The steps of selfing and outcrossing are repeated for an additional 0-5 generations to make a plant line in which the at least one polymorphism is present. The biomass trait can be yield of dry matter, and the plant population can be switchgrass plants.

[0025] This document also features a method of altering the level of biomass in a plant. The method includes modifying an endogenous biomass-modulating nucleic acid, the nucleic acid including a nucleotide sequence with an open reading frame having 80 percent or greater sequence identity to the nucleotide sequence selected from the group consisting of SEQ ID NO: 3, 5, 7, 9, 19, 21, 23, 26, 28, 31, 35, 42, 44, 46, 48, 52, 55, 57, 60, 62, 65, 67, 69, 73, 76, 78, 80, 83, 85, 89, 91, 93, 95, 97, 99, 101, 103, 105, 107, 109, 111, 113, 116, 119, 124, 126, 128, 130, 134, 136, 138, 140, 143, 148, 150, 157, 159, 161, 165, 167, 170, 172, 175, 177, 179, 181, 183, 187, 192, 197, 199, 201, 205, 208, 211, 213, 215, 217, 219, 221, 223, 225, 227, 229, 231, 233, 235, 237, 240, 252, 254, 256, 258, 260, 262, 265, 267, 270, 272, 274, 277, 280, 284, 286, 288, 290, 293, 301, 355, 358, 360, 362, 364, 366, 368, 370, 373, 375, 377, 379, 381, 383, 385, 387, 389, 392, 394, 396, 398, 400, 402, 404, 408, 410, 412, 414, 419, 423, 425, 427, 432, 434, 441, 443, 445, 451, 458, 460, 462, 465, 469, 471, 473, 475, 477, 481, 485, 487, 489, 491, 494, 496, 498, 505, 507, 510, 512, 514, 520, 522, 524, 527, 530, 533, 535, 538, 542, 544, 546, 548, 553, 555, 557, 559, 561, 564, 566, 568, 570, 572, 576, 578, 580, 582, 584, 586, 588, 590, 592, 594, 596, 599, 601, 607, 612, 614, 617, 621, 624, 626, 628, 631, 635, 640, 644, 646, 648, 650, 654, 656, 658, 661, 663, 665, 668, 678, 679, 680, 681, 682, 683, 684, 685, 686, 687, 688, 690, 692, 694, and 696. The plant has a difference in the level of biomass as compared to the corresponding level of a control plant where the nucleic acid has not been modified. The modification can be effected by introducing a genetic modification in the locus comprising the nucleic acid. The method further can include selecting for plants having altered biomass.

[0026] In some embodiments, the endogenous nucleic acid encodes a polypeptide having 80 percent or greater sequence identity to an amino acid sequence selected from the group consisting of SEQ ID NO: 1, 2, 4, 6, 8, 10, 11, 12, 13, 14, 15, 16, 17, 18, 20, 22, 24, 25, 27, 29, 30, 32, 33, 34, 36, 37, 38, 39, 40, 41, 43, 45, 47, 49, 50, 51, 53, 54, 56, 58, 59, 61, 63, 64, 66, 68, 70, 71, 72, 74, 75, 77, 79, 81, 82, 84, 86, 87, 88, 90, 92, 94, 96, 98, 100, 102, 104, 106, 108, 110, 112, 114, 115, 117, 118, 120, 121, 122, 123, 125, 127, 129, 131, 132, 133, 135, 137, 139, 141, 142, 144, 145, 146, 147, 149, 151, 152, 153, 154, 155, 156, 158, 160, 162, 163, 164, 166, 168, 169, 171, 173, 174, 176, 178, 180, 182, 184, 185, 186, 188, 189, 190, 191, 193, 194, 195, 196, 198, 200, 202, 203, 204, 206, 207, 209, 210, 212, 214, 216, 218, 220, 222, 224, 226, 228, 230, 232, 234, 236, 238, 239, 241, 242, 243, 244, 245, 246, 247, 248, 249, 250, 251, 253, 255, 257, 259, 261, 263, 264, 266, 268, 269, 271, 273, 275, 276, 278, 279, 281, 282, 283, 285, 287, 289, 291, 292, 294, 295, 296, 297, 298, 299, 300, 302, 304, 305, 306, 308, 310, 311, 312, 314, 315, 317, 319, 320, 321, 323, 324, 326, 327, 329, 331, 332, 334, 336, 337, 338, 340, 342, 343, 345, 347, 349, 351, 353, 354, 356, 357, 359, 361, 363, 365, 367, 369, 371, 372, 374, 376, 378, 380, 382, 384, 386, 388, 390, 391, 393, 395, 397, 399, 401, 403, 405, 406, 407, 409, 411, 413, 415, 416, 417, 418, 420, 421, 422, 424, 426, 428, 429, 430, 431, 433, 435, 436, 437, 438, 439, 440, 442, 444, 446, 447, 448, 449, 450, 452, 453, 454, 455, 456, 457, 459, 461, 463, 464, 466, 467, 468, 470, 472, 474, 476, 478, 479, 480, 482, 483, 484, 486, 488, 490, 492, 493, 495, 497, 499, 500, 501, 502, 503, 504, 506, 508, 509, 511, 513, 515, 516, 517, 518, 519, 521, 523, 525, 526, 528, 529, 531, 532, 534, 536, 537, 539, 540, 541, 543, 545, 547, 549, 550, 551, 552, 554, 556, 558, 560, 562, 563, 565, 567, 569, 571, 573, 574, 575, 577, 579, 581, 583, 585, 587, 589, 591, 593, 595, 597, 598, 600, 602, 603, 604, 605, 606, 608, 609, 610, 611, 613, 615, 616, 618, 619, 620, 622, 623, 625, 627, 629, 630, 632, 633, 634, 636, 637, 638, 639, 641, 642, 643, 645, 647, 649, 651, 652, 653, 655, 657, 659, 660, 662, 664, 666, 667, 669, 670, 671, 672, 673, 674, 675, 676, 677, 689, 691, 693, 695, and 697.

[0027] In some embodiments, the endogenous nucleic acid comprises a nucleotide sequence with an open reading frame having 90 percent or greater sequence identity to the nucleotide sequence selected from the group consisting of SEQ ID NO: 3, 5, 7, 9, 19, 21, 23, 26, 28, 31, 35, 42, 44, 46, 48, 52, 55, 57, 60, 62, 65, 67, 69, 73, 76, 78, 80, 83, 85, 89, 91, 93, 95, 97, 99, 101, 103, 105, 107, 109, 111, 113, 116, 119, 124, 126, 128, 130, 134, 136, 138, 140, 143, 148, 150, 157, 159, 161, 165, 167, 170, 172, 175, 177, 179, 181, 183, 187, 192, 197, 199, 201, 205, 208, 211, 213, 215, 217, 219, 221, 223, 225, 227, 229, 231, 233, 235, 237, 240, 252, 254, 256, 258, 260, 262, 265, 267, 270, 272, 274, 277, 280, 284, 286, 288, 290, 293, 301, 303, 307, 309, 313, 316, 318, 322, 325, 328, 330, 333, 335, 339, 341, 344, 346, 348, 350, 352, 355, 358, 360, 362, 364, 366, 368, 370, 373, 375, 377, 379, 381, 383, 385, 387, 389, 392, 394, 396, 398, 400, 402, 404, 408, 410, 412, 414, 419, 423, 425, 427, 432, 434, 441, 443, 445, 451, 458, 460, 462, 465, 469, 471, 473, 475, 477, 481, 485, 487, 489, 491, 494, 496, 498, 505, 507, 510, 512, 514, 520, 522, 524, 527, 530, 533, 535, 538, 542, 544, 546, 548, 553, 555, 557, 559, 561, 564, 566, 568, 570, 572, 576, 578, 580, 582, 584, 586, 588, 590, 592, 594, 596, 599, 601, 607, 612, 614, 617, 621, 624, 626, 628, 631, 635, 640, 644, 646, 648, 650, 654, 656, 658, 661, 663, 665, 668, 678, 679, 680, 681, 682, 683, 684, 685, 686, 687, 688, 690, 692, 694, and 696.

[0028] In some embodiments, the endogenous nucleic acid comprises a nucleotide sequence with an open reading frame having 95 percent or greater sequence identity to the nucleotide sequence selected from the group consisting of SEQ ID NO: 3, 5, 7, 9, 19, 21, 23, 26, 28, 31, 35, 42, 44, 46, 48, 52, 55, 57, 60, 62, 65, 67, 69, 73, 76, 78, 80, 83, 85, 89, 91, 93, 95, 97, 99, 101, 103, 105, 107, 109, 111, 113, 116, 119, 124, 126, 128, 130, 134, 136, 138, 140, 143, 148, 150, 157, 159, 161, 165, 167, 170, 172, 175, 177, 179, 181, 183, 187, 192, 197, 199, 201, 205, 208, 211, 213, 215, 217, 219, 221, 223, 225, 227, 229, 231, 233, 235, 237, 240, 252, 254, 256, 258, 260, 262, 265, 267, 270, 272, 274, 277, 280, 284, 286, 288, 290, 293, 301, 303, 307, 309, 313, 316, 318, 322, 325, 328, 330, 333, 335, 339, 341, 344, 346, 348, 350, 352, 355, 358, 360, 362, 364, 366, 368, 370, 373, 375, 377, 379, 381, 383, 385, 387, 389, 392, 394, 396, 398, 400, 402, 404, 408, 410, 412, 414, 419, 423, 425, 427, 432, 434, 441, 443, 445, 451, 458, 460, 462, 465, 469, 471, 473, 475, 477, 481, 485, 487, 489, 491, 494, 496, 498, 505, 507, 510, 512, 514, 520, 522, 524, 527, 530, 533, 535, 538, 542, 544, 546, 548, 553, 555, 557, 559, 561, 564, 566, 568, 570, 572, 576, 578, 580, 582, 584, 586, 588, 590, 592, 594, 596, 599, 601, 607, 612, 614, 617, 621, 624, 626, 628, 631, 635, 640, 644, 646, 648, 650, 654, 656, 658, 661, 663, 665, 668, 678, 679, 680, 681, 682, 683, 684, 685, 686, 687, 688, 690, 692, 694, and 696.

[0029] This document also features a method of producing a plant. The method includes growing a plant cell containing a modified endogenous nucleic acid encoding a polypeptide, wherein the HMM bit score of the amino acid sequence of the polypeptide is greater than about 65, the HMM based on the amino acid sequences depicted in one of FIGS. 1-11, and wherein the plant has a difference in the level of biomass as compared to the corresponding level of a control plant where the nucleic acid has not been modified.

[0030] In another aspect, this document features a plant cell containing a modified endogenous nucleic acid encoding a polypeptide, wherein the HMM bit score of the amino acid sequence of the polypeptide is greater than about 65, the HMM based on the amino acid sequences depicted in one of FIGS. 1-11, and wherein a plant produced from the plant cell has a difference in the level of biomass as compared to the corresponding level of a control plant where the nucleic acid has not been modified.

[0031] This document also features a plant cell containing a modified biomass-modulating endogenous nucleic acid. The nucleic acid comprising a nucleotide sequence with an open reading frame having 80 percent or greater sequence identity to the nucleotide sequence selected from the group consisting of SEQ ID NO: 3, 5, 7, 9, 19, 21, 23, 26, 28, 31, 35, 42, 44, 46, 48, 52, 55, 57, 60, 62, 65, 67, 69, 73, 76, 78, 80, 83, 85, 89, 91, 93, 95, 97, 99, 101, 103, 105, 107, 109, 111, 113, 116, 119, 124, 126, 128, 130, 134, 136, 138, 140, 143, 148, 150, 157, 159, 161, 165, 167, 170, 172, 175, 177, 179, 181, 183, 187, 192, 197, 199, 201, 205, 208, 211, 213, 215, 217, 219, 221, 223, 225, 227, 229, 231, 233, 235, 237, 240, 252, 254, 256, 258, 260, 262, 265, 267, 270, 272, 274, 277, 280, 284, 286, 288, 290, 293, 301, 303, 307, 309, 313, 316, 318, 322, 325, 328, 330, 333, 335, 339, 341, 344, 346, 348, 350, 352, 355, 358, 360, 362, 364, 366, 368, 370, 373, 375, 377, 379, 381, 383, 385, 387, 389, 392, 394, 396, 398, 400, 402, 404, 408, 410, 412, 414, 419, 423, 425, 427, 432, 434, 441, 443, 445, 451, 458, 460, 462, 465, 469, 471, 473, 475, 477, 481, 485, 487, 489, 491, 494, 496, 498, 505, 507, 510, 512, 514, 520, 522, 524, 527, 530, 533, 535, 538, 542, 544, 546, 548, 553, 555, 557, 559, 561, 564, 566, 568, 570, 572, 576, 578, 580, 582, 584, 586, 588, 590, 592, 594, 596, 599, 601, 607, 612, 614, 617, 621, 624, 626, 628, 631, 635, 640, 644, 646, 648, 650, 654, 656, 658, 661, 663, 665, 668, 678, 679, 680, 681, 682, 683, 684, 685, 686, 687, 688, 690, 692, 694, and 696. A plant produced from the plant cell has a difference in the level of biomass as compared to the corresponding level of a control plant where the nucleic acid has not been modified.

[0032] In a plant cell described herein, the endogenous nucleic acid can encode a polypeptide having 80 percent or greater sequence identity to an amino acid sequence selected from the group consisting of SEQ ID NO: 1, 2, 4, 6, 8, 10, 11, 12, 13, 14, 15, 16, 17, 18, 20, 22, 24, 25, 27, 29, 30, 32, 33, 34, 36, 37, 38, 39, 40, 41, 43, 45, 47, 49, 50, 51, 53, 54, 56, 58, 59, 61, 63, 64, 66, 68, 70, 71, 72, 74, 75, 77, 79, 81, 82, 84, 86, 87, 88, 90, 92, 94, 96, 98, 100, 102, 104, 106, 108, 110, 112, 114, 115, 117, 118, 120, 121, 122, 123, 125, 127, 129, 131, 132, 133, 135, 137, 139, 141, 142, 144, 145, 146, 147, 149, 151, 152, 153, 154, 155, 156, 158, 160, 162, 163, 164, 166, 168, 169, 171, 173, 174, 176, 178, 180, 182, 184, 185, 186, 188, 189, 190, 191, 193, 194, 195, 196, 198, 200, 202, 203, 204, 206, 207, 209, 210, 212, 214, 216, 218, 220, 222, 224, 226, 228, 230, 232, 234, 236, 238, 239, 241, 242, 243, 244, 245, 246, 247, 248, 249, 250, 251, 253, 255, 257, 259, 261, 263, 264, 266, 268, 269, 271, 273, 275, 276, 278, 279, 281, 282, 283, 285, 287, 289, 291, 292, 294, 295, 296, 297, 298, 299, 300, 302, 304, 305, 306, 308, 310, 311, 312, 314, 315, 317, 319, 320, 321, 323, 324, 326, 327, 329, 331, 332, 334, 336, 337, 338, 340, 342, 343, 345, 347, 349, 351, 353, 354, 356, 357, 359, 361, 363, 365, 367, 369, 371, 372, 374, 376, 378, 380, 382, 384, 386, 388, 390, 391, 393, 395, 397, 399, 401, 403, 405, 406, 407, 409, 411, 413, 415, 416, 417, 418, 420, 421, 422, 424, 426, 428, 429, 430, 431, 433, 435, 436, 437, 438, 439, 440, 442, 444, 446, 447, 448, 449, 450, 452, 453, 454, 455, 456, 457, 459, 461, 463, 464, 466, 467, 468, 470, 472, 474, 476, 478, 479, 480, 482, 483, 484, 486, 488, 490, 492, 493, 495, 497, 499, 500, 501, 502, 503, 504, 506, 508, 509, 511, 513, 515, 516, 517, 518, 519, 521, 523, 525, 526, 528, 529, 531, 532, 534, 536, 537, 539, 540, 541, 543, 545, 547, 549, 550, 551, 552, 554, 556, 558, 560, 562, 563, 565, 567, 569, 571, 573, 574, 575, 577, 579, 581, 583, 585, 587, 589, 591, 593, 595, 597, 598, 600, 602, 603, 604, 605, 606, 608, 609, 610, 611, 613, 615, 616, 618, 619, 620, 622, 623, 625, 627, 629, 630, 632, 633, 634, 636, 637, 638, 639, 641, 642, 643, 645, 647, 649, 651, 652, 653, 655, 657, 659, 660, 662, 664, 666, 667, 669, 670, 671, 672, 673, 674, 675, 676, 677, 689, 691, 693, 695, and 697, and wherein a plant produced from the plant cell has a difference in the level of biomass as compared to the corresponding level of a control plant where the nucleic acid has not been modified.

[0033] In another aspect, this document features a method of modulating the level of biomass in a plant. The method includes introducing into a plant cell an exogenous nucleic acid, the exogenous nucleic acid encoding a polypeptide having E.C. 2.6.1.83 activity.

[0034] A plant cell also is featured that includes an exogenous nucleic acid, where the exogenous nucleic acid encodes a polypeptide having E.C. 2.6.1.83 activity, and wherein a plant produced from the plant cell has a difference in the level of biomass as compared to the corresponding level of a control plant that does not comprise the nucleic acid.

[0035] Unless otherwise defined, all technical and scientific terms used herein have the same meaning as commonly understood by one of ordinary skill in the art to which this invention pertains. Although methods and materials similar or equivalent to those described herein can be used to practice the invention, suitable methods and materials are described below. All publications, patent applications, patents, and other references mentioned herein are incorporated by reference in their entirety. In case of conflict, the present specification, including definitions, will control. In addition, the materials, methods, and examples are illustrative only and not intended to be limiting.

[0036] The details of one or more embodiments of the invention are set forth in the accompanying drawings and the description below. Other features, objects, and advantages of the invention will be apparent from the description and drawings, and from the claims. The word “comprising” in the claims may be replaced by “consisting essentially of” or with “consisting of,” according to standard practice in patent law.

### DESCRIPTION OF THE DRAWINGS

[0037] FIG. 1 is an alignment of the amino acid sequence of CW00733 corresponding to Ceres Clone: 1384304 (SEQ ID NO: 554) with homologous and/or orthologous amino acid sequences. In all the alignment figures shown herein, a dash in an aligned sequence represents a gap, i.e., a lack of an amino acid at that position. Identical amino acids or conserved amino acid substitutions among aligned sequences are identified by boxes. FIG. 1 and the other alignment figures provided herein were generated using the program MUSCLE version 3.52.

[0038] FIG. 2 is an alignment of the amino acid sequence of CW00319 corresponding to Ceres Annot: 544549 (SEQ ID NO: 263) with homologous and/or orthologous amino acid sequences.

[0039] FIG. 3 is an alignment of the amino acid sequence of CW00710 corresponding to Ceres Annot: 1355066 (SEQ ID NO: 117) with homologous and/or orthologous amino acid sequences.

[0040] FIG. 4 is an alignment of the amino acid sequence of CW00628 corresponding to an antisense sequence of Os01g58420, (SEQ ID NO: 1) with homologous and/or orthologous amino acid sequences.

[0041] FIG. 5 is an alignment of the amino acid sequence of CW00297 corresponding to Ceres Clone: 625057 (SEQ ID NO: 645) with homologous and/or orthologous amino acid sequences.

[0042] FIG. 6 is an alignment of the amino acid sequence of CW00604 corresponding to Ceres Clone: 1356785 (SEQ ID NO: 253) with homologous and/or orthologous amino acid sequences.

[0043] FIG. 7 is an alignment of the amino acid sequence of CW00564 corresponding to Ceres Clone: 638126 (SEQ ID NO: 323) with homologous and/or orthologous amino acid sequences.

[0044] FIG. 8 is an alignment of the amino acid sequence of CW00010 corresponding to Ceres Clone: 26006 (SEQ ID NO: 595) with homologous and/or orthologous amino acid sequences.

[0045] FIG. 9 is an alignment of the amino acid sequence of CW00469 corresponding to Ceres Clone: 4831 (SEQ ID NO: 77) with homologous and/or orthologous amino acid sequences.

[0046] FIG. 10 is an alignment of the amino acid sequence of CW00536 corresponding to Ceres Annot: 847799 (SEQ ID NO:209) with homologous and/or orthologous amino acid sequences.

[0047] FIG. 11 is an alignment of the amino acid sequence of CW00191 corresponding to Ceres Annot: 878355 (SEQ ID NO: 426) with homologous and/or orthologous amino acid sequences.

### DETAILED DESCRIPTION

[0048] The invention features methods and materials related to modulating biomass levels in plants. In some embodiments, the plants may also have modulated levels of, for example, lignin, modified root architecture, modified herbicide resistance, modified carotenoid biosynthesis, or modulated cell wall content. The methods can include transforming a plant cell with a nucleic acid encoding a biomass-modulating polypeptide, wherein expression of the polypeptide results in a modulated level of biomass. Plant cells produced using such methods can be grown to produce plants having an increased or decreased biomass. Such plants, and the seeds of such plants, may be used to produce, for example, biomass having an increased value as a biofuel feedstock.

### I. DEFINITIONS

[0049] “Amino acid” refers to one of the twenty biologically occurring amino acids and to synthetic amino acids, including D/L optical isomers.

[0050] “Cell type-preferential promoter” or “tissue-preferential promoter” refers to a promoter that drives expression preferentially in a target cell type or tissue, respectively, but may also lead to some transcription in other cell types or tissues as well.

[0051] “Control plant” refers to a plant that does not contain the exogenous nucleic acid present in a transgenic plant of interest, but otherwise has the same or similar genetic background as such a transgenic plant. A suitable control plant can be a non-transgenic wild type plant, a non-transgenic segregant from a transformation experiment, or a transgenic plant that contains an exogenous nucleic acid other than the exogenous nucleic acid of interest.

[0052] “Domains” are groups of substantially contiguous amino acids in a polypeptide that can be used to characterize protein families and/or parts of proteins. Such domains have a “fingerprint” or “signature” that can comprise conserved primary sequence, secondary structure, and/or three-dimensional conformation. Generally, domains are correlated with specific in vitro and/or in vivo activities. A domain can have a length of from 10 amino acids to 400 amino acids, e.g., 10 to 50 amino acids, or 25 to 100 amino acids, or 35 to 65 amino acids, or 35 to 55 amino acids, or 45 to 60 amino acids, or 200 to 300 amino acids, or 300 to 400 amino acids.

[0053] “Down-regulation” refers to regulation that decreases production of expression products (mRNA, polypeptide, or both) relative to basal or native states.

[0054] “Exogenous” with respect to a nucleic acid indicates that the nucleic acid is part of a recombinant nucleic acid construct, or is not in its natural environment. For example, an exogenous nucleic acid can be a sequence from one species introduced into another species, i.e., a heterologous nucleic acid. Typically, such an exogenous nucleic acid is introduced into the other species via a recombinant nucleic acid construct. An exogenous nucleic acid can also be a sequence that is native to an organism and that has been reintroduced into cells of that organism. An exogenous nucleic acid that includes a native sequence can often be distinguished from the naturally occurring sequence by the presence of non-natural sequences linked to the exogenous nucleic acid, e.g., non-native regulatory sequences flanking a native sequence in a recombinant nucleic acid construct. In addition, stably transformed exogenous nucleic acids typically are integrated at positions other than the position where the native sequence is found. It will be appreciated that an exogenous nucleic acid may have been introduced into a progenitor and not into the cell under consideration. For example, a transgenic plant containing an exogenous nucleic acid can be the progeny of a cross between a stably transformed plant and a non-transgenic plant. Such progeny are considered to contain the exogenous nucleic acid.

[0055] “Expression” refers to the process of converting genetic information of a polynucleotide into RNA through transcription, which is catalyzed by an enzyme, RNA polymerase, and into protein, through translation of mRNA on ribosomes.

[0056] “Heterologous polypeptide” as used herein refers to a polypeptide that is not a naturally occurring polypeptide in a plant cell, e.g., a transgenic Panicum virgatum plant transformed with and expressing the coding sequence for a nitrogen transporter polypeptide from a Zea mays plant.

[0057] “Isolated nucleic acid” as used herein includes a naturally-occurring nucleic acid, provided one or both of the sequences immediately flanking that nucleic acid in its naturally-occurring genome is removed or absent. Thus, an isolated nucleic acid includes, without limitation, a nucleic acid that exists as a purified molecule or a nucleic acid molecule that is incorporated into a vector or a virus. A nucleic acid existing among hundreds to millions of other nucleic acids within, for example, cDNA libraries, genomic libraries, or gel slices containing a genomic DNA restriction digest, is not to be considered an isolated nucleic acid.

[0058] “Modulation” of the level of biomass refers to the change in the level of the biomass that is observed as a result of expression of, or transcription from, an exogenous nucleic acid in a plant cell and/or plant. The change in level is measured relative to the corresponding level in control plants.

[0059] “Nucleic acid” and “polynucleotide” are used interchangeably herein, and refer to both RNA and DNA, including cDNA, genomic DNA, synthetic DNA, and DNA or RNA containing nucleic acid analogs. A nucleic acid can be double-stranded or single-stranded (i.e., a sense strand or an antisense strand). Non-limiting examples of polynucleotides include genes, gene fragments, exons, introns, messenger RNA (mRNA), transfer RNA, ribosomal RNA, siRNA, micro-RNA, ribozymes, cDNA, recombinant polynucleotides, branched polynucleotides, nucleic acid probes and nucleic acid primers. A polynucleotide may contain unconventional or modified nucleotides.

[0060] “Operably linked” refers to the positioning of a regulatory region and a sequence to be transcribed in a nucleic acid so that the regulatory region is effective for regulating transcription or translation of the sequence. For example, to operably link a coding sequence and a regulatory region, the translation initiation site of the translational reading frame of the coding sequence is typically positioned between one and about fifty nucleotides downstream of the regulatory region. A regulatory region can, however, be positioned as much as about 5,000 nucleotides upstream of the translation initiation site, or about 2,000 nucleotides upstream of the transcription start site.

[0061] “Polypeptide” as used herein refers to a compound of two or more subunit amino acids, amino acid analogs, or other peptidomimetics, regardless of post-translational modification, e.g., phosphorylation or glycosylation. The subunits may be linked by peptide bonds or other bonds such as, for example, ester or ether bonds. Full-length polypeptides, truncated polypeptides, point mutants, insertion mutants, splice variants, chimeric proteins, and fragments thereof are encompassed by this definition.

[0062] “Progeny” includes descendants of a particular plant or plant line. Progeny of an instant plant include seeds formed on F₁, F₂, F₃, F₄, F₅, F₆ and subsequent generation plants, or seeds formed on BC₁, BC₂, BC₃, and subsequent generation plants, or seeds formed on F₁BC₁, F₁BC₂, F₁BC₃, and subsequent generation plants. The designation F₁ refers to the progeny of a cross between two parents that are genetically distinct. The designations F₂, F₃, F₄, F₅ and F₆ refer to subsequent generations of self-or sib-pollinated progeny of an F₁ plant.

[0063] “Regulatory region” refers to a nucleic acid having nucleotide sequences that influence transcription or translation initiation and rate, and stability and/or mobility of a transcription or translation product. Regulatory regions include, without limitation, promoter sequences, enhancer sequences, response elements, protein recognition sites, inducible elements, protein binding sequences, 5′ and 3′ untranslated regions (UTRs), transcriptional start sites, termination sequences, polyadenylation sequences, introns, and combinations thereof. A regulatory region typically comprises at least a core (basal) promoter. A regulatory region also may include at least one control element, such as an enhancer sequence, an upstream element or an upstream activation region (UAR). For example, a suitable enhancer is a cis-regulatory element (−212 to −154) from the upstream region of the octopine synthase (ocs) gene. Fromm et al., The Plant Cell, 1:977-984 (1989).

[0064] “Up-regulation” refers to regulation that increases the level of an expression product (mRNA, polypeptide, or both) relative to basal or native states.

[0065] “Vector” refers to a replicon, such as a plasmid, phage, or cosmid, into which another DNA segment may be inserted so as to bring about the replication of the inserted segment. Generally, a vector is capable of replication when associated with the proper control elements. The term “vector” includes cloning and expression vectors, as well as viral vectors and integrating vectors. An “expression vector” is a vector that includes a regulatory region.

### II. POLYPEPTIDES

[0066] Polypeptides described herein include biomass-modulating polypeptides. Biomass-modulating polypeptides can be effective to modulate biomass levels when expressed in a plant or plant cell. Such polypeptides typically contain at least one domain indicative of biomass-modulating polypeptides, as described in more detail herein. biomass-modulating polypeptides typically have an HMM bit score that is greater than 65 as described in more detail herein. In some embodiments, biomass-modulating polypeptides have greater than 80% identity to SEQ ID NOs: 1, 2, 4, 6, 8, 10, 11, 12, 13, 14, 15, 16, 17, 18, 20, 22, 24, 25, 27, 29, 30, 32, 33, 34, 36, 37, 38, 39, 40, 41, 43, 45, 47, 49, 50, 51, 53, 54, 56, 58, 59, 61, 63, 64, 66, 68, 70, 71, 72, 74, 75, 77, 79, 81, 82, 84, 86, 87, 88, 90, 92, 94, 96, 98, 100, 102, 104, 106, 108, 110, 112, 114, 115, 117, 118, 120, 121, 122, 123, 125, 127, 129, 131, 132, 133, 135, 137, 139, 141, 142, 144, 145, 146, 147, 149, 151, 152, 153, 154, 155, 156, 158, 160, 162, 163, 164, 166, 168, 169, 171, 173, 174, 176, 178, 180, 182, 184, 185, 186, 188, 189, 190, 191, 193, 194, 195, 196, 198, 200, 202, 203, 204, 206, 207, 209, 210, 212, 214, 216, 218, 220, 222, 224, 226, 228, 230, 232, 234, 236, 238, 239, 241, 242, 243, 244, 245, 246, 247, 248, 249, 250, 251, 253, 255, 257, 259, 261, 263, 264, 266, 268, 269, 271, 273, 275, 276, 278, 279, 281, 282, 283, 285, 287, 289, 291, 292, 294, 295, 296, 297, 298, 299, 300, 302, 304, 305, 306, 308, 310, 311, 312, 314, 315, 317, 319, 320, 321, 323, 324, 326, 327, 329, 331, 332, 334, 336, 337, 338, 340, 342, 343, 345, 347, 349, 351, 353, 354, 356, 357, 359, 361, 363, 365, 367, 369, 371, 372, 374, 376, 378, 380, 382, 384, 386, 388, 390, 391, 393, 395, 397, 399, 401, 403, 405, 406, 407, 409, 411, 413, 415, 416, 417, 418, 420, 421, 422, 424, 426, 428, 429, 430, 431, 433, 435, 436, 437, 438, 439, 440, 442, 444, 446, 447, 448, 449, 450, 452, 453, 454, 455, 456, 457, 459, 461, 463, 464, 466, 467, 468, 470, 472, 474, 476, 478, 479, 480, 482, 483, 484, 486, 488, 490, 492, 493, 495, 497, 499, 500, 501, 502, 503, 504, 506, 508, 509, 511, 513, 515, 516, 517, 518, 519, 521, 523, 525, 526, 528, 529, 531, 532, 534, 536, 537, 539, 540, 541, 543, 545, 547, 549, 550, 551, 552, 554, 556, 558, 560, 562, 563, 565, 567, 569, 571, 573, 574, 575, 577, 579, 581, 583, 585, 587, 589, 591, 593, 595, 597, 598, 600, 602, 603, 604, 605, 606, 608, 609, 610, 611, 613, 615, 616, 618, 619, 620, 622, 623, 625, 627, 629, 630, 632, 633, 634, 636, 637, 638, 639, 641, 642, 643, 645, 647, 649, 651, 652, 653, 655, 657, 659, 660, 662, 664, 666, 667, 669, 670, 671, 672, 673, 674, 675, 676, 677, 689, 691, 693, 695, or 697, as described in more detail herein.

### A. Domains Indicative of Biomass-Modulating Polypeptides

[0067] A biomass-modulating polypeptide can contain a Dof domain-zinc finger (zf-Dof), which is predicted to be characteristic of a biomass-modulating polypeptide. SEQ ID NO: 263 sets forth the amino acid sequence of an Arabidopsis clone, identified herein as Ceres Annot: 544549 (SEQ ID NO: 262), that is predicted to encode a polypeptide containing a Dof domain-zinc finger. For example, a biomass-modulating polypeptide can comprise a Dof domain-zinc finger having 60 percent or greater sequence identity to residues 130 to 192 of SEQ ID NO: 263. In some embodiments, a biomass-modulating polypeptide can comprise a Dof domain-zinc finger having 60 percent or greater sequence identity to the Dof domain-zinc finger of one or more of the polypeptides set forth in SEQ ID NOs: 263, 264, 266, 268, 269, 271, 273, 275, 276, 278, 279, 281, 282, 283, 285, 287, 289, 291, 292, 294, 295, 296, 297, 298, 299, 300, 302, 304, 305, 306, 308, 310, 311, 312, 314, 315, 317, 319, 320, or 321. The Dof domain-zinc fingers of such sequences are set forth in the Sequence Listing. Zinc finger (Znf) domains are relatively small protein motifs that bind one or more zinc atoms, and which usually contain multiple finger-like protrusions that make tandem contacts with their target molecule. They were first identified as a DNA-binding motif in transcription factor TFIIIA from Xenopus laevis, however they are now recognized to bind DNA, RNA, protein and/or lipid substrates. Their binding properties depend on the amino acid sequence of the finger domains and of the linker between fingers, as well as on the higher-order structures and the number of fingers. Znf domains are often found in clusters, where fingers can have different binding specificities. There are many superfamilies of Znf motifs, varying in both sequence and structure. They display considerable versatility in binding modes, (e.g. some bind DNA, others protein), suggesting that Znf motifs are stable scaffolds that have evolved specialized functions. For example, Znf-containing proteins function in gene transcription, translation, mRNA trafficking, cytoskeleton organization, epithelial development, cell adhesion, protein folding, chromatin remodeling and zinc sensing, to name but a few. Zinc-binding motifs are stable structures, and they rarely undergo conformational changes upon binding their target. DOF 1.3 orthologs may contain Dof domain-zinc fingers.

[0068] A biomass-modulating polypeptide can contain a phytochelatin synthetase-like domain, which is predicted to be characteristic of a biomass-modulating polypeptide. SEQ ID NO: 117 sets forth the amino acid sequence of an Arabidopsis clone, identified herein as Ceres Annot: 1355066 (SEQ ID NO: 116) that is predicted to encode a polypeptide containing a phytochelatin synthetase-like domain domain. For example, a biomass-modulating polypeptide can comprise a phytochelatin synthetase-like domain domain having 60 percent or greater sequence identity to residues 44 to 208 of SEQ ID NO: 117. In some embodiments, a biomass-modulating polypeptide can comprise a phytochelatin synthetase-like domain domain having 60 percent or greater sequence identity to the phytochelatin synthetase-like domain domain of one or more of the polypeptides set forth in SEQ ID NOs: 117, 118, 120, 121, 122, 123, 125, 127, 129, 131, 132, 133, 135, 137, 139, 141, 142, 144, 145, 146, 147, 149, 151, 152, 153, 154, 155, 156, 158, 160, 162, 163, 164, 166, 168, 169, 171, 173, 174, 176, 178, 180, 182, 184, 185, 186, 188, 189, 190, 191, 193, 194, 195, 196, 198, 200, 202, 203, 204, 206, or 207. The phytochelatin synthetase-like domain domains of such sequences are set forth in the Sequence Listing. Phytochelatin synthase-like protein may be an enzyme responsible for the synthesis of heavy-metal-binding peptides (phytochelatins) from glutathione and related thiols. The enzyme typically catalyses the deglycination of a GSH donor molecule. The enzyme typically contains a catalytic triad of cysteine, histidine and aspartate residues.

[0069] A biomass-modulating polypeptide can contain an AP2 domain, which is predicted to be characteristic of a biomass-modulating polypeptide. SEQ ID NO: 1 sets forth the amino acid sequence of an Oryza sativa clone, identified herein as Os01g58420 that is predicted to encode a polypeptide containing a AP2 domain. For example, a biomass-modulating polypeptide can comprise a AP2 domain having 60 percent or greater sequence identity to residues 32 to 83 of SEQ ID NO: 1. In some embodiments, a biomass-modulating polypeptide can comprise a AP2 domain having 60 percent or greater sequence identity to the AP2 domain of one or more of the polypeptides set forth in SEQ ID NOs: 1, 2, 4, 6, 8, 10, 11, 12, 13, 14, 15, 16, 17, 18, 20, 22, 24, 25, 27, 29, 30, 32, 33, 34, 36, 37, 38, 39, 40, 41, 43, 45, 47, 49, 50, 51, 53, 54, 56, 58, 59, 61, 63, 64, 66, 68, 70, 71, 72, 74, or 75. The AP2 domains of such sequences are set forth in the Sequence Listing. In some embodiments, an antisense sequence is expressed in a plant to modulate biomass as described herein. For example, an antisense nucleic acid sequence of Os01g58420 such as SEQ ID NO: 678, can be expressed in a plant to modulate biomass. AP2 domain amino acid residues can bind to DNA and are typically found in transcription factor proteins.

[0070] A biomass-modulating polypeptide can contain an Aminotransferase class I and II domain, which is predicted to be characteristic of a biomass-modulating polypeptide. SEQ ID NO: 645 sets forth the amino acid sequence of an Glycine max clone, identified herein as Ceres Clone: 625057 (SEQ ID NO: 644), that is predicted to encode a polypeptide containing a Aminotransferase class I and II domain. For example, a biomass-modulating polypeptide can comprise an Aminotransferase class I and II domain having 60 percent or greater sequence identity to residues 88 to 453 of SEQ ID NO: 645. In some embodiments, a biomass-modulating polypeptide can comprise a Aminotransferase class I and II domain having 60 percent or greater sequence identity to the Aminotransferase class I and II domain of one or more of the polypeptides set forth in SEQ ID NOs: 645, 647, 649, 651, 652, 653, 655, 657, 659, 660, 662, 664, 666, 667, 669, 670, 671, 672, 673, 674, 675, 676, 677, or 689. The Aminotransferase class I and II domains of such sequences are set forth in the Sequence Listing. Aminotransferases share certain mechanistic features with other pyridoxal-phosphate dependent enzymes, such as the covalent binding of the pyridoxal-phosphate group to a lysine residue. On the basis of sequence similarity, these various enzymes can be grouped into class I and class II. Examples of polypeptides comprising Aminotransferase class I and II domains include LL-DAP polypeptides (EC 2.6.1.83) (Watanabe et al., Mechanism of Substrate Recognition and PLP-induced Conformational Changes in LL-Diaminopimelate aminotransferase from Arabidopsis thaliana. J. Mol. Biol. 384, 1314-1329 (2008)). LL-DAP catalyzes the interconversion of LL-2,6-diaminoheptanedioate and 2-oxoglutarate to (S)-2,3,4,5-tetrahydropyridine-2,6-dicarboxylate, L-glutamate, and water.

[0071] A biomass-modulating polypeptide can contain a Myb-like DNA-binding domain, which is predicted to be characteristic of a biomass-modulating polypeptide. SEQ ID NO: 323 sets forth the amino acid sequence of an Glycine max clone, identified herein as Ceres Clone: 638126 (SEQ ID NO: 321), that is predicted to encode a polypeptide containing a Myb-like DNA-binding domain. For example, a biomass-modulating polypeptide can comprise a Myb-like DNA-binding domain having 60 percent or greater sequence identity to residues 13 to 62 of SEQ ID NO: 323. In some embodiments, a biomass-modulating polypeptide can comprise a Myb-like DNA-binding domain having 60 percent or greater sequence identity to the Myb-like DNA-binding domain of one or more of the polypeptides set forth in SEQ ID NOs: 323, 324, 326, 327, 329, 331, 332, 334, 336, 337, 338, 340, 342, 343, 345, 347, 349, 351, 353, 354, 356, 357, 359, 361, 363, 365, 367, 369, 371, 372, 374, 376, 378, 380, 382, 384, 386, 388, 390, 391, 393, 395, 397, 399, 401, 403, 405, 406, 407, 409, 411, 413, 415, 416, 417, 418, 420, 421, 422, or 424. The Myb-like DNA-binding domains of such sequences are set forth in the Sequence Listing. The Myb-like DNA-binding domain family contains the DNA binding domains from Myb proteins, as well as the SANT domain family.

[0072] A biomass-modulating polypeptide can contain an alpha/beta hydrolase fold domain, which is predicted to be characteristic of a biomass-modulating polypeptide. SEQ ID NO: 595 sets forth the amino acid sequence of an Arabidopsis clone, identified herein as Ceres Clone: 26006 (SEQ ID NO: 594), that is predicted to encode a polypeptide containing an alpha/beta hydrolase fold domain. For example, a biomass-modulating polypeptide can comprise an alpha/beta hydrolase fold domain having 60 percent or greater sequence identity to residues 35 to 257 of SEQ ID NO: 595. In some embodiments, a biomass-modulating polypeptide can comprise an alpha/beta hydrolase fold domain having 60 percent or greater sequence identity to the alpha/beta hydrolase fold domain of one or more of the polypeptides set forth in SEQ ID NOs: 595, 597, 598, 600, 602, 603, 604, 605, 606, 608, 609, 610, 611, 613, 615, 616, 618, 619, 620, 622, 623, 625, 627, 629, 630, 632, 633, 634, 636, 637, 638, 639, 641, 642, 643, or 691. The alpha/beta hydrolase fold domains of such sequences are set forth in the Sequence Listing. The alpha/beta hydrolase fold is common to a number of hydrolytic enzymes of widely differing phylogenetic origin and catalytic function. The core of each enzyme is an alpha/beta-sheet (rather than a barrel), containing 8 strands connected by helices. The enzymes are believed to have diverged from a common ancestor, preserving the arrangement of the catalytic residues. All have a catalytic triad, the elements of which are borne on loops, which are the best conserved structural features of the fold.

[0073] A biomass-modulating polypeptide can contain a Rapid Alkalinization Factor (RALF) domain, which is predicted to be characteristic of a biomass-modulating polypeptide. SEQ ID NO: 77 sets forth the amino acid sequence of an Arabidopsis clone, identified herein as Ceres Clone: 4831 (SEQ ID NO: 76), that is predicted to encode a polypeptide containing a RALF domain. For example, a biomass-modulating polypeptide can comprise a RALF domain having 60 percent or greater sequence identity to residues 57 to 129 of SEQ ID NO: 77. In some embodiments, a biomass-modulating polypeptide can comprise a RALF domain having 60 percent or greater sequence identity to the RALF domain of one or more of the polypeptides set forth in SEQ ID NOs: 77, 79, 81, 82, 84, 86, 87, 88, 90, 92, 94, 96, 98, 100, 102, 104, 106, 108, 110, 112, 114, or 115. The RALF domains of such sequences are set forth in the Sequence Listing. RALF domains are typically found in 5-kDa ubiquitous polypeptides in plants, which have been reported to play a role in the arrest of root growth and development in some plants.

[0074] A biomass-modulating polypeptide can contain a DUF640 domain, which is predicted to be characteristic of a biomass-modulating polypeptide. SEQ ID NO: 209 sets forth the amino acid sequence of an Arabidopsis clone, identified herein as Ceres Annot: 847799 (SEQ ID NO: 208), that is predicted to encode a polypeptide containing a DUF640 domain. For example, a biomass-modulating polypeptide can comprise a DUF640 domain having 60 percent or greater sequence identity to residues 19 to 152 of SEQ ID NO: 209. In some embodiments, a biomass-modulating polypeptide can comprise a DUF640 domain having 60 percent or greater sequence identity to the DUF640 domain of one or more of the polypeptides set forth in SEQ ID NOs: 209, 210, 212, 214, 216, 218, 220, 222, 224, 226, 228, 230, 232, 234, 236, 238, 239, 241, 242, 243, 244, 245, 246, 247, 248, 249, 250, or 251. The DUF640 domains of such sequences are set forth in the Sequence Listing.

[0075] A biomass-modulating polypeptide can contain a PTR2 POT family domain, which is predicted to be characteristic of a biomass-modulating polypeptide. SEQ ID NO: 426 sets forth the amino acid sequence of an Arabidopsis clone, identified herein as Ceres Annot: 878355 (SEQ ID NO: 425), that is predicted to encode a polypeptide containing a PTR2 POT family domain. For example, a biomass-modulating polypeptide can comprise a PTR2 POT family domain having 60 percent or greater sequence identity to residues 100 to 509 of SEQ ID NO: 426. In some embodiments, a biomass-modulating polypeptide can comprise a PTR2 POT family domain having 60 percent or greater sequence identity to the PTR2 POT family domain of one or more of the polypeptides set forth in SEQ ID NOs: 426, 428, 429, 430, 431, 433, 435, 436, 437, 438, 439, 440, 442, 444, 446, 447, 448, 449, 450, 452, 453, 454, 455, 456, 457, 459, 461, 463, 464, 466, 467, 468, 470, 472, 474, 476, 478, 479, 480, 482, 483, 484, 486, 488, 490, 492, 493, 495, 497, 499, 500, 501, 502, 503, 504, 506, 508, 509, 511, 513, 515, 516, 517, 518, 519, 521, 523, 525, 526, 528, 529, 531, 532, 534, 536, 537, 539, 540, 541, 543, 545, 547, 549, 550, 551, 552, 693, 695, or 697. The PTR2 POT family domains of such sequences are set forth in the Sequence Listing. The transport of peptides into cells is a well-documented biological phenomenon which is accomplished by specific, energy-dependent transporters found in a number of organisms as diverse as bacteria and humans. The PTR family of proteins is distinct from the ABC-type peptide transporters and was uncovered by sequence analyses of a number of recently discovered peptide transport proteins. These proteins seem to be mainly involved in the intake of small peptides with the concomitant uptake of a proton. In some embodiments, a POT protein as described herein can comprise an N-terminus signal peptide. In some embodiments, the signal peptide may be specific for a plasma membrane. In some embodiments, the signal peptide may be specific for a endoplasmic reticulum membrane or a chloroplast membrane. Examples of signal peptides are shown in the Sequence Listing of the application. Bioinformatics techniques can be employed to predict the presence and type of transit peptides. These approaches do not rely exclusively on sequence similarity. Because orthologous proteins more often have the same localization, the degree of sequence similarity needed to infer co-localization is higher than for similar three-dimensional structure, and isoforms of the same protein may have different localization. WoLF PSORT can be used to predict signal peptides (Horton et al., 2007 “WoLF PSORT: Protein Localization Predictor”, Nucleic Acids Research, doi:10.1093/nar/gkm259, 2007; Horton et al., 2006 “Protein Subcellular Localization Prediction with WoLF PSORT”, Proceedings of the 4th Annual Asia Pacific Bioinformatics Conference APBC06, Taipei, Taiwan. pp. 39-48, 2006). Examples of signal peptides from sequences in the public domain can be obtained from a WoLF PSORT analysis of a sequence which provides numerous orthologous signal peptides.

[0076] In eukaryotic organisms, there are several types of signal peptides and related sorting signals all of which involve membrane translocation and/or insertion. Typically, signal peptides specific for the endoplasmic reticulum (ER) are co-translational, whereas signal peptides specific for the mitochondria or chloroplast are post-translational, but unfolded by chaperones. For example, an N-terminal signal with variable length hydrophobic section, causes proteins to be co-translationally transported through or into the endoplasmic reticulum membrane. N-terminal signals are mostly independent of carrier proteins. Such signal peptides are typically interchangeable between different proteins, are typically cleaved, and are typically limited to about the first 90 amino acid residues. Cleavage, presence on N-terminal, and co-translational recognition make signal peptides typically orthogonal to protein function, but this is a general relationship. In some embodiments, a POT protein as described herein can comprise a C-terminal sorting signal. Examples of C-terminal sorting signals include, but are not limited to, KDEL (soluble) or KKXX (membrane protein) signal for ER retention, SKL for peroxisomal targeting (soluble), NPIR for vacuole, and LPXTG for bacterial cell wall. In some embodiments, a POT protein as described herein can comprise an internal sorting signal. Such signals include nuclear localization signals that occur on the surface of a folded protein but can be anywhere on the 1-dimensional sequence. In some embodiments, a POT protein as described herein can comprise an N-terminus signal peptide that is about 95, 90, 85, 80, 75, 70, 65, 60, 55, 50, 45, 40, 35, 30, 25, 20, 15, 10, or 5 amino acids in length beginning from the N-terminus of said POT protein. In some embodiments, a POT protein as described herein is lacking all or part of an N-terminus signal peptide. In some embodiments, a POT protein as described herein can have an N-terminus signal peptide removed and replaced with a different an N-terminus signal peptide. For example, one skilled in the art can remove or synthesize a sequence without the 45 N-terminus amino acids of SEQ ID NO: (426) and add, through fusion techniques or through synthesis, another signal peptide with specificity for the same or a different target membrane.

[0077] In some embodiments, a biomass-modulating polypeptide is truncated at the amino- or carboxy-terminal end of a naturally occurring polypeptide. A truncated polypeptide may retain certain domains of the naturally occurring polypeptide while lacking others. Thus, length variants that are up to 5 amino acids shorter or longer typically exhibit the biomass-modulating activity of a truncated polypeptide. In some embodiments, a truncated polypeptide is a dominant negative polypeptide. Expression in a plant of such a truncated polypeptide confers a difference in the level of biomass of a plant as compared to the corresponding level of a control plant that does not comprise the truncation.

### B. Functional Homologs Identified by Reciprocal BLAST

[0078] In some embodiments, one or more functional homologs of a reference biomass-modulating polypeptide defined by one or more of the Pfam descriptions indicated above are suitable for use as biomass-modulating polypeptides. A functional homolog is a polypeptide that has sequence similarity to a reference polypeptide, and that carries out one or more of the biochemical or physiological function(s) of the reference polypeptide. A functional homolog and the reference polypeptide may be natural occurring polypeptides, and the sequence similarity may be due to convergent or divergent evolutionary events. As such, functional homologs are sometimes designated in the literature as homologs, or orthologs, or paralogs. Variants of a naturally occurring functional homolog, such as polypeptides encoded by mutants of a wild type coding sequence, may themselves be functional homologs. Functional homologs can also be created via site-directed mutagenesis of the coding sequence for a biomass-modulating polypeptide, or by combining domains from the coding sequences for different naturally-occurring biomass-modulating polypeptides (“domain swapping”). The term “functional homolog” is sometimes applied to the nucleic acid that encodes a functionally homologous polypeptide.

[0079] Functional homologs can be identified by analysis of nucleotide and polypeptide sequence alignments. For example, performing a query on a database of nucleotide or polypeptide sequences can identify homologs of biomass-modulating polypeptides. Sequence analysis can involve BLAST, Reciprocal BLAST, or PSI-BLAST analysis of nonredundant databases using a biomass-modulating polypeptide amino acid sequence as the reference sequence. Amino acid sequence is, in some instances, deduced from the nucleotide sequence. Those polypeptides in the database that have greater than 40% sequence identity are candidates for further evaluation for suitability as a biomass-modulating polypeptide. Amino acid sequence similarity allows for conservative amino acid substitutions, such as substitution of one hydrophobic residue for another or substitution of one polar residue for another. If desired, manual inspection of such candidates can be carried out in order to narrow the number of candidates to be further evaluated. Manual inspection can be performed by selecting those candidates that appear to have domains present in biomass-modulating polypeptides, e.g., conserved functional domains.

[0080] Conserved regions can be identified by locating a region within the primary amino acid sequence of a biomass-modulating polypeptide that is a repeated sequence, forms some secondary structure (e.g., helices and beta sheets), establishes positively or negatively charged domains, or represents a protein motif or domain. See, e.g., the Pfam web site describing consensus sequences for a variety of protein motifs and domains on the World Wide Web at sanger.ac.uk/Software/Pfam/and pfam.janclia.org/. A description of the information included at the Pfam database is described in Sonnhammer et al., Nucl. Acids Res., 26:320-322 (1998); Sonnhammer et al., Proteins, 28:405-420 (1997); and Bateman et al., Nucl. Acids Res., 27:260-262 (1999). Conserved regions also can be determined by aligning sequences of the same or related polypeptides from closely related species. Closely related species preferably are from the same family. In some embodiments, alignment of sequences from two different species is adequate.

[0081] Typically, polypeptides that exhibit at least about 40% amino acid sequence identity are useful to identify conserved regions. Conserved regions of related polypeptides exhibit at least 45% amino acid sequence identity (e.g., at least 50%, at least 60%, at least 70%, at least 80%, or at least 90% amino acid sequence identity). In some embodiments, a conserved region exhibits at least 92%, 94%, 96%, 98%, or 99% amino acid sequence identity.

[0082] Examples of amino acid sequences of functional homologs of the polypeptide set forth in SEQ ID NO: 554 are provided in FIG. 1 and in the Sequence Listing. Such functional homologs include, for example, Ceres Annot:564098 (SEQ ID NO: 556), CeresAnnot:1443290 (SEQ ID NO: 558), CeresClone:1042157 (SEQ ID NO: 560), CeresClone:1919714 (SEQ ID NO: 562), GI:157336039 (SEQ ID NO: 563), CeresAnnot:8454153 (SEQ ID NO: 565), CeresAnnot:1722302 (SEQ ID NO: 567), CeresAnnot:8733140 (SEQ ID NO: 569), CeresAnnot:1452096 (SEQ ID NO: 571), CeresClone:1645639 (SEQ ID NO: 573), GI:157344920 (SEQ ID NO: 574), GI:115440865 (SEQ ID NO: 575), CeresClone:340925 (SEQ ID NO: 577), CeresAnnot:8669404 (SEQ ID NO: 579), CeresClone:100028078 (SEQ ID NO: 581), CeresAnnot:1503869 (SEQ ID NO: 583), CeresAnnot:1525651 (SEQ ID NO: 585), CeresClone:2031281 (SEQ ID NO: 587), CeresClone:483742 (SEQ ID NO: 589), CeresClone:100802111 (SEQ ID NO: 591), or CeresClone:1460255 (SEQ ID NO: 593). In some cases, a functional homolog of SEQ ID NO: 554 has an amino acid sequence with at least 45% sequence identity, e.g., 50%, 52%, 56%, 59%, 61%, 65%, 70%, 75%, 80%, 85%, 90%, 95%, 97%, 98%, or 99% sequence identity, to the amino acid sequence set forth in SEQ ID NO: 554.

[0083] Examples of amino acid sequences of functional homologs of the polypeptide set forth in SEQ ID NO: 263 are provided in FIG. 2 and in the Sequence Listing. Such functional homologs include, for example, GI:157355009 (SEQ ID NO: 264), Ceres Annot:1464457 (SEQ ID NO: 266), CeresClone:1584660 (SEQ ID NO: 268), GI:115474149 (SEQ ID NO: 269), CeresAnnot:8636233 (SEQ ID NO:271), CeresClone:1777035 (SEQ ID NO: 273), CeresClone:1990929 (SEQ ID NO: 275), GI:194692166 (SEQ ID NO: 276), CeresAnnot:1458507 (SEQ ID NO: 278), GI:147780712 (SEQ ID NO:279), CeresAnnot:8642924 (SEQ ID NO: 281), GI:115451001 (SEQ ID NO: 282), AAF87041 (SEQ ID NO: 283), CeresClone:1573856 (SEQ ID NO: 285), CeresAnnot:1476818 (SEQ ID NO:287), CeresAnnot:1450024 (SEQ ID NO: 289), CeresAnnot: 1503065 (SEQ ID NO: 291), GI:147866358 (SEQ ID NO: 292), CeresClone:230073 (SEQ ID NO: 294), (SEQ ID NO: 295), (SEQ ID NO: 296), GI:78708599 (SEQ ID NO: 297), GI:15451553 (SEQ ID NO: 298), GI:125542572 (SEQ ID NO: 299), GI:157342426 (SEQ ID NO:300), CeresAnnot:538622 (SEQ ID NO: 302), CeresAnnot:8460661 (SEQ ID NO: 304), GI:15983797 (SEQ ID NO: 305), GI:115435804 (SEQ ID NO: 306), CeresClone:1599579 (SEQ ID NO:308), CeresAnnot:1469831 (SEQ ID NO: 310), GI:9758342 (SEQ ID NO: 311), GI:21536859 (SEQ ID NO: 312), CeresClone:113639 (SEQ ID NO: 314), GI:15232818 (SEQ ID NO: 315), CeresClone:1571328 (SEQ ID NO: 317), CeresClone:1868988 (SEQ ID NO: 319), GI:1669341 (SEQ ID NO: 320), or GI:157359317 (SEQ ID NO: 321). In some cases, a functional homolog of SEQ ID NO: 263 has an amino acid sequence with at least 45% sequence identity, e.g., 50%, 52%, 56%, 59%, 61%, 65%, 70%, 75%, 80%, 85%, 90%, 95%, 97%, 98%, or 99% sequence identity, to the amino acid sequence set forth in SEQ ID NO: 263.

[0084] Examples of amino acid sequences of functional homologs of the polypeptide set forth in SEQ ID NO: 117 are provided in FIG. 3 and in the Sequence Listing. Such functional homologs include, for example, GI:90657534 (SEQ ID NO: 118), CeresClone:1237946 (SEQ ID NO: 120), GI:118488472 (SEQ ID NO: 121), GI:38194917 (SEQ ID NO: 122), GI:157341292 (SEQ ID NO: 123), CeresClone:1957107 (SEQ ID NO: 125), CeresAnnot:8640603 (SEQ ID NO: 127), CeresClone:829440 (SEQ ID NO: 129), CeresClone:285169 (SEQ ID NO: 131), GI:116790012 (SEQ ID NO: 132), GI:157356290 (SEQ ID NO: 133), CeresAnnot:1450186 (SEQ ID NO: 135), CeresClone:1804732 (SEQ ID NO: 137), CeresClone:1781794 (SEQ ID NO: 139), CeresAnnot:8656625 (SEQ ID NO: 141), GI:162462515 (SEQ ID NO: 142), CeresClone:570485 (SEQ ID NO: 144), GI:125586664 (SEQ ID NO: 145), GI:116788824 (SEQ ID NO: 146), GI:115453531 (SEQ ID NO: 147), CeresClone:17250 (SEQ ID NO: 149), CeresAnnot:1363625 (SEQ ID NO: 151), GI:75133694 (SEQ ID NO: 152), GI:147780878 (SEQ ID NO: 153), GI:157341291 (SEQ ID NO: 154), GI:38194916 (SEQ ID NO: 155), GI:157356291 (SEQ ID NO: 156), CeresClone:1883580 (SEQ ID NO: 158), CeresClone:1848658 (SEQ ID NO: 160), CeresAnnot:1450185 (SEQ ID NO: 162), GI:13477083 (SEQ ID NO: 163), GI:115463639 (SEQ ID NO: 164), CeresClone:98007 (SEQ ID NO: 166), CeresAnnot:1326475 (SEQ ID NO: 168), GI:115473243 (SEQ ID NO: 169), CeresAnnot:870466 (SEQ ID NO: 171), CeresClone:1806851 (SEQ ID NO: 173), GI:75133695 (SEQ ID NO: 174), CeresClone:1788775 (SEQ ID NO: 176), CeresClone:1546455 (SEQ ID NO: 178), CeresClone:1902642 (SEQ ID NO: 180), CeresAnnot:8632643 (SEQ ID NO: 182), CeresClone:236876 (SEQ ID NO: 184), GI:90657629 (SEQ ID NO: 185), GI:30090032 (SEQ ID NO: 186), CeresAnnot:8640602 (SEQ ID NO: 188), GI:115453533 (SEQ ID NO: 189), GI:162462330 (SEQ ID NO: 190), GI:38230578 (SEQ ID NO: 191), CeresAnnot:8632641 (SEQ ID NO: 193), GI:168016456 (SEQ ID NO: 194), GI:125532513 (SEQ ID NO: 195), GI:157354382 (SEQ ID NO: 196), CeresAnnot:1481980 (SEQ ID NO: 198), CeresAnnot:1535466 (SEQ ID NO: 200), CeresAnnot:1297618 (SEQ ID NO: 202), GI:119040466 (SEQ ID NO: 203), GI:116310381 (SEQ ID NO: 204), CeresAnnot:8702104 (SEQ ID NO: 206), or GI:157340500 (SEQ ID NO: 207). In some cases, a functional homolog of SEQ ID NO: 117 has an amino acid sequence with at least 45% sequence identity, e.g., 50%, 52%, 56%, 59%, 61%, 65%, 70%, 75%, 80%, 85%, 90%, 95%, 97%, 98%, or 99% sequence identity, to the amino acid sequence set forth in SEQ ID NO: 117.

[0085] Examples of amino acid sequences of functional homologs of the polypeptide set forth in SEQ ID NO: 1 are provided in FIG. 4 and in the Sequence Listing. Such functional homologs include, for example, GI:84795244 (SEQ ID NO:2), CeresClone:1725396 (SEQ ID NO:4), CeresAnnot:8669118 (SEQ ID NO:6), CeresClone:280241 (SEQ ID NO:8), CeresClone:1712594 (SEQ ID NO:10), GI:190361125 (SEQ ID NO:11), GI:4099921 (SEQ ID NO:12), GI:147844573 (SEQ ID NO:13), GI:67906426 (SEQ ID NO:14), GI:57012757 (SEQ ID NO:15), GI:56567583 (SEQ ID NO:16), GI:84795246 (SEQ ID NO:17), GI:84795248 (SEQ ID NO:18), CeresClonc:1805203 (SEQ ID NO:20), CeresClone:101497672 (SEQ ID NO:22), CeresClone:224845 (SEQ ID NO:24), GI:115464685 (SEQ ID NO:25), CeresClone:1287030 (SEQ ID NO:27), CeresAnnot:8733383 (SEQ ID NO:29), GI:84795240 (SEQ ID NO:30), CeresClone:1806017 (SEQ ID NO:32), GI:84795242 (SEQ ID NO:33), GI:84795238 (SEQ ID NO: 34), CeresClone:1733772 (SEQ ID NO:36), GI:37625037 (SEQ ID NO:37), GI:37625035 (SEQ ID NO:38), GI:147805535 (SEQ ID NO:39), GI:157358724 (SEQ ID NO:40), GI:4099914 (SEQ ID NO:41), CeresAnnot:1520029 (SEQ ID NO:43), CeresClone:1065091 (SEQ ID NO:45), CeresClone:1793792 (SEQ ID NO:47), CeresClone:1619220 (SEQ ID NO:49), GI:57012875 (SEQ ID NO:50), GI:147811787 (SEQ ID NO:51), CeresClone:1842925 (SEQ ID NO:53), GI:20340233 (SEQ ID NO:54), CeresClone:1657843 (SEQ ID NO:56), CeresAnnot:1455887 (SEQ ID NO:58), GI:118490009 (SEQ ID NO:59), CeresClone:1381515 (SEQ ID NO:61), CeresClone:22775 (SEQ ID NO:63), GI:60459377 (SEQ ID NO:64), CeresAnnot:1488231 (SEQ ID NO: 66), CeresClone:1884969 (SEQ ID NO:68), CeresClone:1802100 (SEQ ID NO:70), GI:156145802 (SEQ ID NO:71), GI:28274832 (SEQ ID NO:72), CeresClone:568399 (SEQ ID NO: 74), or GI:115460458 (SEQ ID NO:75). In some cases, a functional homolog of SEQ ID NO: 1 has an amino acid sequence with at least 45% sequence identity, e.g., 50%, 52%, 56%, 59%, 61%, 65%, 70%, 75%, 80%, 85%, 90%, 95%, 97%, 98%, or 99% sequence identity, to the amino acid sequence set forth in SEQ ID NO: 1.

[0086] Examples of amino acid sequences of functional homologs of the polypeptide set forth in SEQ ID NO: 645 are provided in FIG. 5 and in the Sequence Listing. Such functional homologs include, for example CeresClone:1925947 (SEQ ID NO: 647), CeresAnnot:1514501 (SEQ ID NO: 649), CeresAnnot:849672 (SEQ ID NO:651), GI:157355942 (SEQ ID NO:652), GI:115452503 (SEQ ID NO: 653), CeresClone:1790933 (SEQ ID NO:655), CeresAnnot:8641620 (SEQ ID NO:657), CeresClone:281497 (SEQ ID NO:659), GI:168013851 (SEQ ID NO: 660), CeresClone:143214 (SEQ ID NO:662), CeresClone:1781022 (SEQ ID NO:664), CeresClone:618639 (SEQ ID NO:666), GI:118483001 (SEQ ID NO: 667), CeresClone:38404 (SEQ ID NO:669), GI:3549670 (SEQ ID NO:670), GI:37703720 (SEQ ID NO:671), GI:152149571 (SEQ ID NO: 672), GI:125603687 (SEQ ID NO:673), GI:108707679 (SEQ ID NO: 674), GI:157352390 (SEQ ID NO:675), GI:159469820 (SEQ ID NO: 676), GI:145344081 (SEQ ID NO:677), or Ceres Annot ID no. 1461228 (SEQ ID NO:689). In some cases, a functional homolog of SEQ ID NO: 645 has an amino acid sequence with at least 45% sequence identity, e.g., 50%, 52%, 56%, 59%, 61%, 65%, 70%, 75%, 80%, 85%, 90%, 95%, 97%, 98%, or 99% sequence identity, to the amino acid sequence set forth in SEQ ID NO: 645.

[0087] Examples of amino acid sequences of functional homologs of the polypeptide set forth in SEQ ID NO: 253 are provided in FIG. 6 and in the Sequence Listing. Such functional homologs include, for example, CeresClonc:951785 (SEQ ID NO: 255), CeresAnnot:1440346 (SEQ ID NO: 257), CeresClone:1085177 (SEQ ID NO: 259), or CeresClone:157151 (SEQ ID NO: 261). In some cases, a functional homolog of SEQ ID NO: 253 has an amino acid sequence with at least 45% sequence identity, e.g., 50%, 52%, 56%, 59%, 61%, 65%, 70%, 75%, 80%, 85%, 90%, 95%, 97%, 98%, or 99% sequence identity, to the amino acid sequence set forth in SEQ ID NO: 253.

[0088] Examples of amino acid sequences of functional homologs of the polypeptide set forth in SEQ ID NO: 323 are provided in FIG. 7 and in the Sequence Listing. Such functional homologs include, for example, GI:157340812 (SEQ ID NO:324), CeresAnnot:1460824 (SEQ ID NO:326), GI:145356202 (SEQ ID NO:327), CeresClone:477814 (SEQ ID NO:329), CeresClone:1914387 (SEQ ID NO:331), GI:7981380 (SEQ ID NO:332), CeresClone:1910072 (SEQ ID NO:334), CeresClone:331755 (SEQ ID NO:336), GI:124360540 (SEQ ID NO:337), GI:157335318 (SEQ ID NO: 338), CeresAnnot:1503394 (SEQ ID NO:340), CeresAnnot:1442707 (SEQ ID NO:342), GI:147784500 (SEQ ID NO:343), CeresAnnot:1514100 (SEQ ID NO:345), CeresAnnot:850366 (SEQ ID NO:347), CeresAnnot:543794 (SEQ ID NO:349), CeresAnnot:1495620 (SEQ ID NO: 351), CeresClone:1653552 (SEQ ID NO:353), GI:147767321 (SEQ ID NO:354), CeresAnnot:1510450 (SEQ ID NO:356), GI:110931736 (SEQ ID NO:357), CeresClone:1916884 (SEQ ID NO:359), CeresClone:1847251 (SEQ ID NO:361), CeresAnnot:1457249 (SEQ ID NO: 363), CeresClone:1113584 (SEQ ID NO:365), CeresClone:1927753 (SEQ ID NO:367), CeresClone:857342 (SEQ ID NO:369), CeresClone:100068619 (SEQ ID NO:371), GI:145327247 (SEQ ID NO:372), CeresAnnot:8461532 (SEQ ID NO:374), CeresClone:1722230 (SEQ ID NO: 376), CeresClone:1897493 (SEQ ID NO:378), CeresAnnot:838426 (SEQ ID NO:380), CeresAnnot:827713 (SEQ ID NO:382), CeresClone:1763593 (SEQ ID NO:384), CeresClone:143475 (SEQ ID NO:386), CeresAnnot:8456508 (SEQ ID NO:388), CeresClone:100002959 (SEQ ID NO:390), GI:118137433 (SEQ ID NO:391), CeresClone:1523182 (SEQ ID NO:393), CeresClone:1761808 (SEQ ID NO:395), CeresClone:1069222 (SEQ ID NO:397), CeresAnnot:8734209 (SEQ ID NO:399), CeresAnnot:8461540 (SEQ ID NO:401), CeresClone:1086604 (SEQ ID NO:403), CeresClone:41695 (SEQ ID NO:405), GI:112292440 (SEQ ID NO:406), GI:116830269 (SEQ ID NO: 407), CeresClone:1775942 (SEQ ID NO:409), CeresClone:1723374 (SEQ ID NO:411), CeresAnnot:1457230 (SEQ ID NO:413), CeresAnnot:8667653 (SEQ ID NO:415), GI:115465643 (SEQ ID NO:416), GI:5091605 (SEQ ID NO:417), GI:125553458 (SEQ ID NO:418), CeresAnnot:1510435 (SEQ ID NO:420), GI:115438765 (SEQ ID NO:421), GI:112292438 (SEQ ID NO: 422), or CeresAnnot:1770841 (SEQ ID NO:424). In some cases, a functional homolog of SEQ ID NO: 323 has an amino acid sequence with at least 45% sequence identity, e.g., 50%, 52%, 56%, 59%, 61%, 65%, 70%, 75%, 80%, 85%, 90%, 95%, 97%, 98%, or 99% sequence identity, to the amino acid sequence set forth in SEQ ID NO: 323.

[0089] Examples of amino acid sequences of functional homologs of the polypeptide set forth in SEQ ID NO: 595 are provided in FIG. 8 and in the Sequence Listing. Such functional homologs include, for example, CeresClone:644331 (SEQ ID NO: 597), GI:15227859 (SEQ ID NO: 598), CeresAnnot:1504349 (SEQ ID NO: 600), CeresAnnot:1265088 (SEQ ID NO: 602), (SEQ ID NO: 603), GI:125527987 (SEQ ID NO: 604), GI:14279437 (SEQ ID NO: 605), ES902065 (SEQ ID NO: 606), CeresClone:1065042 (SEQ ID NO: 608), GI:157329790 (SEQ ID NO: 609), GI:15227861 (SEQ ID NO: 610), GI:146272407 (SEQ ID NO: 611), CeresClone:95094 (SEQ ID NO: 613), CeresClone:1714893 (SEQ ID NO: 615), GI:157329890 (SEQ ID NO: 616), CeresAnnot:859635 (SEQ ID NO: 618), GI:115440397 (SEQ ID NO: 619), GI:40549303 (SEQ ID NO: 620), CeresAnnot:1457048 (SEQ ID NO: 622), GI:50401192 (SEQ ID NO: 623), CeresAnnot:1451281 (SEQ ID NO: 625), CeresAnnot:1510252 (SEQ ID NO: 627), CeresClone:1822691 (SEQ ID NO: 629), GI:197312921 (SEQ ID NO: 630), CeresAnnot:8456439 (SEQ ID NO: 632), EX096388 (SEQ ID NO: 633), GI:15028131 (SEQ ID NO: 634), CeresClone:270875 (SEQ ID NO: 636), GI:27754457 (SEQ ID NO: 637), GI:16648679 (SEQ ID NO: 638), GI:15227863 (SEQ ID NO: 639), CeresAnnot:1451282 (SEQ ID NO: 641), GI:53830670 (SEQ ID NO: 642), GI:146272405 (SEQ ID NO: 643), or CeresAnnot:827940 (SEQ ID NO: 691). In some cases, a functional homolog of SEQ ID NO: 595 has an amino acid sequence with at least 45% sequence identity, e.g., 50%, 52%, 56%, 59%, 61%, 65%, 70%, 75%, 80%, 85%, 90%, 95%, 97%, 98%, or 99% sequence identity, to the amino acid sequence set forth in SEQ ID NO: 595.

[0090] Examples of amino acid sequences of functional homologs of the polypeptide set forth in SEQ ID NO: 77 are provided in FIG. 9 and in the Sequence Listing. Such functional homologs include, for example, CeresClone:1387948 (SEQ ID NO: 79), CeresClone:1937714 (SEQ ID NO: 81), GI:157345132 (SEQ ID NO: 82), CeresClone:464828 (SEQ ID NO: 84), CeresAnnot:1451368 (SEQ ID NO: 86), GI:37695575 (SEQ ID NO: 87), GI:116790033 (SEQ ID NO: 88), CeresClone:1346042 (SEQ ID NO: 90), CeresClone:1118610 (SEQ ID NO: 92), CeresClone:982000 (SEQ ID NO: 94), CeresClone:959670 (SEQ ID NO: 96), CeresClone:952522 (SEQ ID NO: 98), CeresClone:1914539 (SEQ ID NO: 100), CeresClone:668581 (SEQ ID NO: 102), CeresClone:1914939 (SEQ ID NO: 104), CeresClone:723694 (SEQ ID NO: 106), CeresAnnot:1456949 (SEQ ID NO: 108), CeresAnnot:1539918 (SEQ ID NO: 110), CeresAnnot:8456138 (SEQ ID NO: 112), CeresAnnot:1486506 (SEQ ID NO: 114), or GI:116786293 (SEQ ID NO: 115). In some cases, a functional homolog of SEQ ID NO: 77 has an amino acid sequence with at least 45% sequence identity, e.g., 50%, 52%, 56%, 59%, 61%, 65%, 70%, 75%, 80%, 85%, 90%, 95%, 97%, 98%, or 99% sequence identity, to the amino acid sequence set forth in SEQ ID NO: 77.

[0091] Examples of amino acid sequences of functional homologs of the polypeptide set forth in SEQ ID NO: 209 are provided in FIG. 10 and in the Sequence Listing. Such functional homologs include, for example, GI:116780542 (SEQ ID NO: 210), CeresClone:1848017 (SEQ ID NO: 212), CeresAnnot:1466494 (SEQ ID NO: 214), CeresAnnot:1449022 (SEQ ID NO: 216), CeresAnnot:1482911 (SEQ ID NO: 218), CeresClone:1118987 (SEQ ID NO: 220), CeresClone:1073674 (SEQ ID NO: 222), CeresClone:1084747 (SEQ ID NO: 224), CeresClone:536345 (SEQ ID NO: 226), CeresClone:1650005 (SEQ ID NO: 228), CeresAnnot:8453882 (SEQ ID NO: 230), CeresAnnot:1373087 (SEQ ID NO: 232), CeresAnnot:8669372 (SEQ ID NO: 234), CeresClone:1048839 (SEQ ID NO: 236), CeresClone:281322 (SEQ ID NO: 238), GI:147795605 (SEQ ID NO: 239), CeresClone:2004419 (SEQ ID NO: 241), GI:125543059 (SEQ ID NO: 242), AT1G16910_LSH8 (SEQ ID NO: 243), ATIG78815_LSH7 (SEQ ID NO: 244), AT2G31160_LSH3 (SEQ ID NO: 245), AT2G42610_LSH10 (SEQ ID NO: 246), AT3G04510_LSH2 (SEQ ID NO: 247), AT3G23290_LSH4 (SEQ ID NO: 248), AT5G28490_LSH1 (SEQ ID NO: 249), AT5G58500_LSH5 (SEQ ID NO: 250), or At1g07090_LSH6 (SEQ ID NO: 251). In some cases, a functional homolog of SEQ ID NO: 209 has an amino acid sequence with at least 45% sequence identity, e.g., 50%, 52%, 56%, 59%, 61%, 65%, 70%, 75%, 80%, 85%, 90%, 95%, 97%, 98%, or 99% sequence identity, to the amino acid sequence set forth in SEQ ID NO: 209.

[0092] Examples of amino acid sequences of functional homologs of the polypeptide set forth in SEQ ID NO: 426 are provided in FIG. 11 and in the Sequence Listing. Such functional homologs include, for example, CeresAnnot:1472338_Pb (SEQ ID NO: 428), GI:157344683_Vv (SEQ ID NO: 429), GI:87240677_Mt (SEQ ID NO: 430), GI:115448297_Os (SEQ ID NO: 431), CeresClone:1844568_Pv (SEQ ID NO: 433), CeresClonc:797829_Tm (SEQ ID NO: 435), GI:168033816_Pp (SEQ ID NO: 436), GI:116788004_Ps (SEQ ID NO: 437), GI:149900503_Ha (SEQ ID NO: 438), GI:4102839_Sl (SEQ ID NO: 439), GI:31088360_Vf (SEQ ID NO: 440), CeresAnnot:8681236_Sb (SEQ ID NO: 442), CeresAnnot:8519531_Gm (SEQ ID NO: 444), CeresAnnot:8631372_Zm (SEQ ID NO: 446), GI:151426449_Hv (SEQ ID NO: 447), GI:192757675_Br (SEQ ID NO: 448), GI:2655098 (SEQ ID NO: 449), GI:194690746 (SEQ ID NO: 450), CeresClone:752925 (SEQ ID NO: 452), GI:125540898 (SEQ ID NO: 453), GI:26451333 (SEQ ID NO: 454), GI:2160144 (SEQ ID NO: 455), GI:30696666 (SEQ ID NO: 456), GI:125556922 (SEQ ID NO: 457), CeresAnnot:1529287 (SEQ ID NO: 459), CeresClone:1806748 (SEQ ID NO: 461), CeresAnnot:8755095 (SEQ ID NO: 463), GI:147827175 (SEQ ID NO: 464), CeresClone:1888865 (SEQ ID NO: 466), GI:157337163 (SEQ ID NO: 467), GI:115434472 (SEQ ID NO: 468), CeresAnnot:6252512 (SEQ ID NO: 470), CeresAnnot:1569074_Mt (SEQ ID NO: 472), CeresAnnot:1475845 (SEQ ID NO: 474), CeresAnnot:1501483 (SEQ ID NO: 476), CeresAnnot:8755079 (SEQ ID NO: 478), GI:115470147(SEQ ID NO: 479), GI:15240905 (SEQ ID NO: 480), CeresAnnot:8755085 (SEQ ID NO: 482), GI:147853446 (SEQ ID NO: 483), GI:157346087 (SEQ ID NO: 484), CeresAnnot:1538867 (SEQ ID NO: 486), CeresAnnot:8755091 (SEQ ID NO: 488), CeresAnnot:1492702 (SEQ ID NO: 490), CeresClone:325604 (SEQ ID NO: 492), GI:108707040 (SEQ ID NO: 493), CeresAnnot:1302517_At (SEQ ID NO: 495), CeresAnnot:1355964 (SEQ ID NO: 497), CeresAnnot:8755104 (SEQ ID NO: 499), GI:147802380 (SEQ ID NO: 500), GI:510238 (SEQ ID NO: 501), GI:157341962 (SEQ ID NO: 502), GI:6635838 (SEQ ID NO: 503), GI:4455276 (SEQ ID NO: 504), CeresAnnot:8642246 (SEQ ID NO: 506), CeresAnnot:8633032 (SEQ ID NO: 508), GI:157337654 (SEQ ID NO: 509), CeresAnnot:8642241 (SEQ ID NO: 511), CeresAnnot:1520085 (SEQ ID NO: 513), CeresAnnot:1514979 (SEQ ID NO: 515), GI:147858202 (SEQ ID NO: 516), GI:125545538 (SEQ ID NO: 517), GI:115451771 (SEQ ID NO: 518), GI:125587732 (SEQ ID NO: 519), CeresAnnot:1516968 (SEQ ID NO: 521), CeresClone:350844 (SEQ ID NO: 523), CeresAnnot:8658700 (SEQ ID NO: 525), GI:157346088 (SEQ ID NO: 526), CeresClone:1926916 (SEQ ID NO: 528), GI:15226861 (SEQ ID NO: 529), CeresClone:816960 (SEQ ID NO: 531), GI:15232435 (SEQ ID NO: 532), CeresAnnot:8643789 (SEQ ID NO: 534), CeresAnnot:8631367 (SEQ ID NO: 536), GI:157339093 (SEQ ID NO: 537), CeresAnnot:8633031 (SEQ ID NO: 539), GI:125543029 (SEQ ID NO: 540), GI:115454995 (SEQ ID NO: 541), CeresAnnot:8755090 (SEQ ID NO: 543), CeresAnnot:8755097 (SEQ ID NO: 545), CeresAnnot:8755098 (SEQ ID NO: 547), CeresAnnot:8755099 (SEQ ID NO: 549), (SEQ ID NO: 550), (SEQ ID NO: 551), (SEQ ID NO: 552), CeresAnnot:6086224 (SEQ ID NO:693), CeresClone:476769 (SEQ ID NO:695), or CeresClone:15650 (SEQ ID NO:697). In some cases, a functional homolog of SEQ ID NO: 426has an amino acid sequence with at least 45% sequence identity, e.g., 50%, 52%, 56%, 59%, 61%, 65%, 70%, 75%, 80%, 85%, 90%, 95%, 97%, 98%, or 99% sequence identity, to the amino acid sequence set forth in SEQ ID NO: 426.

[0093] The identification of conserved regions in a biomass-modulating polypeptide facilitates production of variants of biomass-modulating polypeptides. Variants of biomass-modulating polypeptides typically have 10 or fewer conservative amino acid substitutions within the primary amino acid sequence, e.g., 7 or fewer conservative amino acid substitutions, 5 or fewer conservative amino acid substitutions, or between 1 and 5 conservative substitutions. A useful variant polypeptide can be constructed based on one of the alignments set forth in FIG. 1, FIG. 2, FIG. 3, FIG. 4, FIG. 5, FIG. 6, FIG. 7, FIG. 8, FIG. 9, FIG. 10, or FIG. 11 and/or homologs identified in the Sequence Listing. Such a polypeptide includes the conserved regions, arranged in the order depicted in the Figure from amino-terminal end to carboxy-terminal end. Such a polypeptide may also include zero, one, or more than one amino acid in positions marked by dashes. When no amino acids are present at positions marked by dashes, the length of such a polypeptide is the sum of the amino acid residues in all conserved regions. When amino acids are present at a position marked by dashes, such a polypeptide has a length that is the sum of the amino acid residues in all conserved regions and all dashes.

### C. Functional Homologs Identified by HMMER

[0094] In some embodiments, useful biomass-modulating polypeptides include those that fit a Hidden Markov Model based on the polypeptides set forth in any one of FIGS. 1-11. A Hidden Markov Model (HMM) is a statistical model of a consensus sequence for a group of functional homologs. Sec, Durbin et al., Biological Sequence Analysis: Probabilistic Models of Proteins and Nucleic Acids, Cambridge University Press, Cambridge, UK (1998). An HMM is generated by the program HMMER 2.3.2 with default program parameters, using the sequences of the group of functional homologs as input. The multiple sequence alignment is generated by ProbCons (Do et al., Genome Res., 15(2):330-40 (2005)) version 1.11 using a set of default parameters: -c, --consistency REPS of 2; -ir, --iterative-refinement REPS of 100; -pre, --pre-training REPS of 0. ProbCons is a public domain software program provided by Stanford University.

[0095] The default parameters for building an HMM (hmmbuild) are as follows: the default “architecture prior” (archpri) used by MAP architecture construction is 0.85, and the default cutoff threshold (idlevel) used to determine the effective sequence number is 0.62. HMMER 2.3.2 was released Oct. 3, 2003 under a GNU general public license, and is available from various sources on the World Wide Web such as hmmer.janelia.org; hmmer.wustl.edu; and fr.com/hmmer232/. Hmmbuild outputs the model as a text file.

[0096] The HMM for a group of functional homologs can be used to determine the likelihood that a candidate biomass-modulating polypeptide sequence is a better fit to that particular HMM than to a null HMM generated using a group of sequences that are not structurally or functionally related. The likelihood that a candidate polypeptide sequence is a better fit to an HMM than to a null HMM is indicated by the HMM bit score, a number generated when the candidate sequence is fitted to the HMM profile using the HMMER hmmsearch program. The following default parameters are used when running hmmsearch: the default E-value cutoff (E) is 10.0, the default bit score cutoff (T) is negative infinity, the default number of sequences in a database (Z) is the real number of sequences in the database, the default E-value cutoff for the per-domain ranked hit list (domE) is infinity, and the default bit score cutoff for the per-domain ranked hit list (domT) is negative infinity. A high HMM bit score indicates a greater likelihood that the candidate sequence carries out one or more of the biochemical or physiological function(s) of the polypeptides used to generate the HMM. A high HMM bit score is at least 20, and often is higher. Slight variations in the HMM bit score of a particular sequence can occur due to factors such as the order in which sequences are processed for alignment by multiple sequence alignment algorithms such as the ProbCons program. Nevertheless, such HMM bit score variation is minor.

[0097] The biomass-modulating polypeptides discussed below fit the indicated HMM with an HMM bit score greater than to 65. (e.g., greater than 70, 80, 90, 100, 120, 140, 200, 300, 500, 1000, 1500, or 2000). In some embodiments, the HMM bit score of a biomass-modulating polypeptide discussed below is about 50%, 60%, 70%, 80%, 90%, or 95% of the HMM bit score of a functional homolog provided in the Sequence Listing of this application. In some embodiments, a biomass-modulating polypeptide discussed below fits the indicated HMM with an HMM bit score greater than 210, and has a domain indicative of a biomass-modulating polypeptide. In some embodiments, a biomass-modulating polypeptide discussed below fits the indicated HMM with an HMM bit score greater than 210, and has 65% or greater sequence identity (e.g., 75%, 80%, 85%, 90%, 95%, or 100% sequence identity) to an amino acid sequence shown in any one of FIGS. 1-11.

[0098] Examples of polypeptides are shown in the sequence listing that have HMM bit scores greater than 130 when fitted to an HMM generated from the amino acid sequences set forth in FIG. 1 are identified in the Sequence Listing of this application. Such polypeptides include, for example, SEQ ID NOs: 554, 556, 558, 560, 562, 563, 565, 567, 569, 571, 573, 574, 575, 577, 579, 581, 583, 585, 587, 589, 591, or 593.

[0099] Examples of polypeptides are shown in the sequence listing that have HMM bit scores greater than 340 when fitted to an HMM generated from the amino acid sequences set forth in FIG. 2 are identified in the Sequence Listing of this application. Such polypeptides include, for example, SEQ ID NOs: 263, 264, 266, 268, 269, 271, 273, 275, 276, 278, 279, 281, 282, 283, 285, 287, 289, 291, 292, 294, 295, 296, 297, 298, 299, 300, 302, 304, 305, 306, 308, 310, 311, 312, 314, 315, 317, 319, 320, or 321.

[0100] Examples of polypeptides are shown in the sequence listing that have HMM bit scores greater than 530 when fitted to an HMM generated from the amino acid sequences set forth in FIG. 3 are identified in the Sequence Listing of this application. Such polypeptides include, for example, SEQ ID NOs: 117, 118, 120, 121, 122, 123, 125, 127, 129, 131, 132, 133, 135, 137, 139, 141, 142, 144, 145, 146, 147, 149, 151, 152, 153, 154, 155, 156, 158, 160, 162, 163, 164, 166, 168, 169, 171, 173, 174, 176, 178, 180, 182, 184, 185, 186, 188, 189, 190, 191, 193, 194, 195, 196, 198, 200, 202, 203, 204, 206, or 207.

[0101] Examples of polypeptides are shown in the sequence listing that have HMM bit scores greater than 120 when fitted to an HMM generated from the amino acid sequences set forth in FIG. 4 are identified in the Sequence Listing of this application. Such polypeptides include, for example, SEQ ID NOs: 1, 2, 4, 6, 8, 10, 11, 12, 13, 14, 15, 16, 17, 18, 20, 22, 24, 25, 27, 29, 30, 32, 33, 34, 36, 37, 38, 39, 40, 41, 43, 45, 47, 49, 50, 51, 53, 54, 56, 58, 59, 61, 63, 64, 66, 68, 70, 71, 72, 74, or 75.

[0102] Examples of polypeptides are shown in the sequence listing that have HMM bit scores greater than 635 when fitted to an HMM generated from the amino acid sequences set forth in FIG. 5 are identified in the Sequence Listing of this application. Such polypeptides include, for example, SEQ ID NOs: 645, 647, 649, 651, 652, 653, 655, 657, 659, 660, 662, 664, 666, 667, 669, 670, 671, 672, 673, 674, 675, 676, 677, or 689.

[0103] Examples of polypeptides are shown in the sequence listing that have HMM bit scores greater than 65 when fitted to an HMM generated from the amino acid sequences set forth in FIG. 6 are identified in the Sequence Listing of this application. Such polypeptides include, for example, SEQ ID NOs: 255, 257, 259, or 261.

[0104] Examples of polypeptides are shown in the sequence listing that have HMM bit scores greater than 100 when fitted to an HMM generated from the amino acid sequences set forth in FIG. 7 are identified in the Sequence Listing of this application. Such polypeptides include, for example, SEQ ID NOs: 323, 324, 326, 327, 329, 331, 332, 334, 336, 337, 338, 340, 342, 343, 345, 347, 349, 351, 353, 354, 356, 357, 359, 361, 363, 365, 367, 369, 371, 372, 374, 376, 378, 380, 382, 384, 386, 388, 390, 391, 393, 395, 397, 399, 401, 403, 405, 406, 407, 409, 411, 413, 415, 416, 417, 418, 420, 421, 422, or 424.

[0105] Examples of polypeptides are shown in the sequence listing that have HMM bit scores greater than 480 when fitted to an HMM generated from the amino acid sequences set forth in FIG. 8 are identified in the Sequence Listing of this application. Such polypeptides include, for example, SEQ ID NOs: 595, 597, 598, 600, 602, 603, 604, 605, 606, 608, 609, 610, 611, 613, 615, 616, 618, 619, 620, 622, 623, 625, 627, 629, 630, 632, 633, 634, 636, 637, 638, 639, 641, 642, 643, or 691.

[0106] Examples of polypeptides are shown in the sequence listing that have HMM bit scores greater than 145 when fitted to an HMM generated from the amino acid sequences set forth in FIG. 9 are identified in the Sequence Listing of this application. Such polypeptides include, for example, SEQ ID NOs: 77, 79, 81, 82, 84, 86, 87, 88, 90, 92, 94, 96, 98, 100, 102, 104, 106, 108, 110, 112, 114, or 115.

[0107] Examples of polypeptides are shown in the sequence listing that have HMM bit scores greater than 280 when fitted to an HMM generated from the amino acid sequences set forth in FIG. 10 are identified in the Sequence Listing of this application. Such polypeptides include, for example, SEQ ID NOs: 209, 210, 212, 214, 216, 218, 220, 222, 224, 226, 228, 230, 232, 234, 236, 238, 239, 241, 242, 243, 244, 245, 246, 247, 248, 249, 250, or 251.

[0108] Examples of polypeptides are shown in the sequence listing that have HMM bit scores greater than 1000 when fitted to an HMM generated from the amino acid sequences set forth in FIG. 11 are identified in the Sequence Listing of this application. Such polypeptides include, for example, SEQ ID NOs: 426, 428, 429, 430, 431, 433, 435, 436, 437, 438, 439, 440, 442, 444, 446, 447, 448, 449, 450, 452, 453, 454, 455, 456, 457, 459, 461, 463, 464, 466, 467, 468, 470, 472, 474, 476, 478, 479, 480, 482, 483, 484, 486, 488, 490, 492, 493, 495, 497, 499, 500, 501, 502, 503, 504, 506, 508, 509, 511, 513, 515, 516, 517, 518, 519, 521, 523, 525, 526, 528, 529, 531, 532, 534, 536, 537, 539, 540, 541, 543, 545, 547, 549, 550, 551, 552, 693, 695, or 697.

### D. Percent Identity

[0109] In some embodiments, a biomass-modulating polypeptide has an amino acid sequence with at least 45% sequence identity, e.g., 50%, 52%, 56%, 59%, 61%, 65%, 70%, 75%, 80%, 85%, 90%, 95%, 97%, 98%, or 99% sequence identity, to one of the amino acid sequences set forth in SEQ ID NOs: 1, 2, 4, 6, 8, 10, 11, 12, 13, 14, 15, 16, 17, 18, 20, 22, 24, 25, 27, 29, 30, 32, 33, 34, 36, 37, 38, 39, 40, 41, 43, 45, 47, 49, 50, 51, 53, 54, 56, 58, 59, 61, 63, 64, 66, 68, 70, 71, 72, 74, 75, 77, 79, 81, 82, 84, 86, 87, 88, 90, 92, 94, 96, 98, 100, 102, 104, 106, 108, 110, 112, 114, 115, 117, 118, 120, 121, 122, 123, 125, 127, 129, 131, 132, 133, 135, 137, 139, 141, 142, 144, 145, 146, 147, 149, 151, 152, 153, 154, 155, 156, 158, 160, 162, 163, 164, 166, 168, 169, 171, 173, 174, 176, 178, 180, 182, 184, 185, 186, 188, 189, 190, 191, 193, 194, 195, 196, 198, 200, 202, 203, 204, 206, 207, 209, 210, 212, 214, 216, 218, 220, 222, 224, 226, 228, 230, 232, 234, 236, 238, 239, 241, 242, 243, 244, 245, 246, 247, 248, 249, 250, 251, 253, 255, 257, 259, 261, 263, 264, 266, 268, 269, 271, 273, 275, 276, 278, 279, 281, 282, 283, 285, 287, 289, 291, 292, 294, 295, 296, 297, 298, 299, 300, 302, 304, 305, 306, 308, 310, 311, 312, 314, 315, 317, 319, 320, 321, 323, 324, 326, 327, 329, 331, 332, 334, 336, 337, 338, 340, 342, 343, 345, 347, 349, 351, 353, 354, 356, 357, 359, 361, 363, 365, 367, 369, 371, 372, 374, 376, 378, 380, 382, 384, 386, 388, 390, 391, 393, 395, 397, 399, 401, 403, 405, 406, 407, 409, 411, 413, 415, 416, 417, 418, 420, 421, 422, 424, 426, 428, 429, 430, 431, 433, 435, 436, 437, 438, 439, 440, 442, 444, 446, 447, 448, 449, 450, 452, 453, 454, 455, 456, 457, 459, 461, 463, 464, 466, 467, 468, 470, 472, 474, 476, 478, 479, 480, 482, 483, 484, 486, 488, 490, 492, 493, 495, 497, 499, 500, 501, 502, 503, 504, 506, 508, 509, 511, 513, 515, 516, 517, 518, 519, 521, 523, 525, 526, 528, 529, 531, 532, 534, 536, 537, 539, 540, 541, 543, 545, 547, 549, 550, 551, 552, 554, 556, 558, 560, 562, 563, 565, 567, 569, 571, 573, 574, 575, 577, 579, 581, 583, 585, 587, 589, 591, 593, 595, 597, 598, 600, 602, 603, 604, 605, 606, 608, 609, 610, 611, 613, 615, 616, 618, 619, 620, 622, 623, 625, 627, 629, 630, 632, 633, 634, 636, 637, 638, 639, 641, 642, 643, 645, 647, 649, 651, 652, 653, 655, 657, 659, 660, 662, 664, 666, 667, 669, 670, 671, 672, 673, 674, 675, 676, 677, 689, 691, 693, 695, or 697. Polypeptides having such a percent sequence identity often have a domain indicative of a biomass-modulating polypeptide and/or have an HMM bit score that is greater than 65, as discussed above. Amino acid sequences of biomass-modulating polypeptides having at least 80% sequence identity to one of the amino acid sequences set forth in SEQ ID NOs: 1, 2, 4, 6, 8, 10, 11, 12, 13, 14, 15, 16, 17, 18, 20, 22, 24, 25, 27, 29, 30, 32, 33, 34, 36, 37, 38, 39, 40, 41, 43, 45, 47, 49, 50, 51, 53, 54, 56, 58, 59, 61, 63, 64, 66, 68, 70, 71, 72, 74, 75, 77, 79, 81, 82, 84, 86, 87, 88, 90, 92, 94, 96, 98, 100, 102, 104, 106, 108, 110, 112, 114, 115, 117, 118, 120, 121, 122, 123, 125, 127, 129, 131, 132, 133, 135, 137, 139, 141, 142, 144, 145, 146, 147, 149, 151, 152, 153, 154, 155, 156, 158, 160, 162, 163, 164, 166, 168, 169, 171, 173, 174, 176, 178, 180, 182, 184, 185, 186, 188, 189, 190, 191, 193, 194, 195, 196, 198, 200, 202, 203, 204, 206, 207, 209, 210, 212, 214, 216, 218, 220, 222, 224, 226, 228, 230, 232, 234, 236, 238, 239, 241, 242, 243, 244, 245, 246, 247, 248, 249, 250, 251, 253, 255, 257, 259, 261, 263, 264, 266, 268, 269, 271, 273, 275, 276, 278, 279, 281, 282, 283, 285, 287, 289, 291, 292, 294, 295, 296, 297, 298, 299, 300, 302, 304, 305, 306, 308, 310, 311, 312, 314, 315, 317, 319, 320, 321, 323, 324, 326, 327, 329, 331, 332, 334, 336, 337, 338, 340, 342, 343, 345, 347, 349, 351, 353, 354, 356, 357, 359, 361, 363, 365, 367, 369, 371, 372, 374, 376, 378, 380, 382, 384, 386, 388, 390, 391, 393, 395, 397, 399, 401, 403, 405, 406, 407, 409, 411, 413, 415, 416, 417, 418, 420, 421, 422, 424, 426, 428, 429, 430, 431, 433, 435, 436, 437, 438, 439, 440, 442, 444, 446, 447, 448, 449, 450, 452, 453, 454, 455, 456, 457, 459, 461, 463, 464, 466, 467, 468, 470, 472, 474, 476, 478, 479, 480, 482, 483, 484, 486, 488, 490, 492, 493, 495, 497, 499, 500, 501, 502, 503, 504, 506, 508, 509, 511, 513, 515, 516, 517, 518, 519, 521, 523, 525, 526, 528, 529, 531, 532, 534, 536, 537, 539, 540, 541, 543, 545, 547, 549, 550, 551, 552, 554, 556, 558, 560, 562, 563, 565, 567, 569, 571, 573, 574, 575, 577, 579, 581, 583, 585, 587, 589, 591, 593, 595, 597, 598, 600, 602, 603, 604, 605, 606, 608, 609, 610, 611, 613, 615, 616, 618, 619, 620, 622, 623, 625, 627, 629, 630, 632, 633, 634, 636, 637, 638, 639, 641, 642, 643, 645, 647, 649, 651, 652, 653, 655, 657, 659, 660, 662, 664, 666, 667, 669, 670, 671, 672, 673, 674, 675, 676, 677, 689, 691, 693, 695, or 697 are provided in FIGS. 1-11 and in the Sequence Listing.

[0110] “Percent sequence identity” refers to the degree of sequence identity between any given reference sequence, e.g., SEQ ID NO: 1, and a candidate biomass-modulating sequence. A candidate sequence typically has a length that is from 80 percent to 200 percent of the length of the reference sequence, e.g., 82, 85, 87, 89, 90, 93, 95, 97, 99, 100, 105, 110, 115, 120, 130, 140, 150, 160, 170, 180, 190, or 200 percent of the length of the reference sequence. A percent identity for any candidate nucleic acid or polypeptide relative to a reference nucleic acid or polypeptide can be determined as follows. A reference sequence (e.g., a nucleic acid sequence or an amino acid sequence) is aligned to one or more candidate sequences using the computer program ClustalW (version 1.83, default parameters), which allows alignments of nucleic acid or polypeptide sequences to be carried out across their entire length (global alignment). Chenna et al., Nucleic Acids Res., 31(13):3497-500 (2003).

[0111] ClustalW calculates the best match between a reference and one or more candidate sequences, and aligns them so that identities, similarities and differences can be determined. Gaps of one or more residues can be inserted into a reference sequence, a candidate sequence, or both, to maximize sequence alignments. For fast pairwise alignment of nucleic acid sequences, the following default parameters are used: word size: 2; window size: 4; scoring method: percentage; number of top diagonals: 4; and gap penalty: 5. For multiple alignment of nucleic acid sequences, the following parameters are used: gap opening penalty: 10.0; gap extension penalty: 5.0; and weight transitions: yes. For fast pairwise alignment of protein sequences, the following parameters are used: word size: 1; window size: 5; scoring method: percentage; number of top diagonals: 5; gap penalty: 3. For multiple alignment of protein sequences, the following parameters are used: weight matrix: blosum; gap opening penalty: 10.0; gap extension penalty: 0.05; hydrophilic gaps: on; hydrophilic residues: Gly, Pro, Ser, Asn, Asp, Gln, Glu, Arg, and Lys; residue-specific gap penalties: on. The ClustalW output is a sequence alignment that reflects the relationship between sequences. ClustalW can be run, for example, at the Baylor College of Medicine Search Launcher site on the World Wide Web (searchlauncher.bcm.tmc.cdu/multi-align/multi-align.html) and at the European Bioinformatics Institute site on the World Wide Web (cbi.ac.uk/clustalw).

[0112] To determine percent identity of a candidate nucleic acid or amino acid sequence to a reference sequence, the sequences are aligned using ClustalW, the number of identical matches in the alignment is divided by the length of the reference sequence, and the result is multiplied by 100. It is noted that the percent identity value can be rounded to the nearest tenth. For example, 78.11, 78.12, 78.13, and 78.14 are rounded down to 78.1, while 78.15, 78.16, 78.17, 78.18, and 78.19 are rounded up to 78.2.

[0113] In some cases, a biomass-modulating polypeptide has an amino acid sequence with at least 45% sequence identity, e.g., 50%, 52%, 56%, 59%, 61%, 65%, 70%, 75%, 80%, 85%, 90%, 95%, 97%, 98%, or 99% sequence identity, to the amino acid sequence set forth in SEQ ID NO: 554. Amino acid sequences of polypeptides having greater than 45% sequence identity to the polypeptide set forth in SEQ ID NO: 554 are provided in FIG. 1 and in the Sequence Listing.

[0114] In some cases, a biomass-modulating polypeptide has an amino acid sequence with at least 45% sequence identity, e.g., 50%, 52%, 56%, 59%, 61%, 65%, 70%, 75%, 80%, 85%, 90%, 95%, 97%, 98%, or 99% sequence identity, to the amino acid sequence set forth in SEQ ID NO: 263. Amino acid sequences of polypeptides having greater than 45% sequence identity to the polypeptide set forth in SEQ ID NO: 263 are provided in FIG. 2 and in the Sequence Listing.

[0115] In some cases, a biomass-modulating polypeptide has an amino acid sequence with at least 45% sequence identity, e.g., 50%, 52%, 56%, 59%, 61%, 65%, 70%, 75%, 80%, 85%, 90%, 95%, 97%, 98%, or 99% sequence identity, to the amino acid sequence set forth in SEQ ID NO: 117. Amino acid sequences of polypeptides having greater than 45% sequence identity to the polypeptide set forth in SEQ ID NO: 117 are provided in FIG. 3 and in the Sequence Listing.

[0116] In some cases, a biomass-modulating polypeptide has an amino acid sequence with at least 45% sequence identity, e.g., 50%, 52%, 56%, 59%, 61%, 65%, 70%, 75%, 80%, 85%, 90%, 95%, 97%, 98%, or 99% sequence identity, to the amino acid sequence set forth in SEQ ID NO: 1. Amino acid sequences of polypeptides having greater than 45% sequence identity to the polypeptide set forth in SEQ ID NO: 1 are provided in FIG. 4 and in the Sequence Listing.

[0117] In some cases, a biomass-modulating polypeptide has an amino acid sequence with at least 45% sequence identity, e.g., 50%, 52%, 56%, 59%, 61%, 65%, 70%, 75%, 80%, 85%, 90%, 95%, 97%, 98%, or 99% sequence identity, to the amino acid sequence set forth in SEQ ID NO: 645. Amino acid sequences of polypeptides having greater than 45% sequence identity to the polypeptide set forth in SEQ ID NO: 645 are provided in FIG. 5 and in the Sequence Listing.

[0118] In some cases, a biomass-modulating polypeptide has an amino acid sequence with at least 45% sequence identity, e.g., 50%, 52%, 56%, 59%, 61%, 65%, 70%, 75%, 80%, 85%, 90%, 95%, 97%, 98%, or 99% sequence identity, to the amino acid sequence set forth in SEQ ID NO: 253. Amino acid sequences of polypeptides having greater than 45% sequence identity to the polypeptide set forth in SEQ ID NO: 253 are provided in FIG. 6 and in the Sequence Listing.

[0119] In some cases, a biomass-modulating polypeptide has an amino acid sequence with at least 45% sequence identity, e.g., 50%, 52%, 56%, 59%, 61%, 65%, 70%, 75%, 80%, 85%, 90%, 95%, 97%, 98%, or 99% sequence identity, to the amino acid sequence set forth in SEQ ID NO: 323. Amino acid sequences of polypeptides having greater than 45% sequence identity to the polypeptide set forth in SEQ ID NO: 323 are provided in FIG. 7 and in the Sequence Listing.

[0120] In some cases, a biomass-modulating polypeptide has an amino acid sequence with at least 45% sequence identity, e.g., 50%, 52%, 56%, 59%, 61%, 65%, 70%, 75%, 80%, 85%, 90%, 95%, 97%, 98%, or 99% sequence identity, to the amino acid sequence set forth in SEQ ID NO: 595. Amino acid sequences of polypeptides having greater than 45% sequence identity to the polypeptide set forth in SEQ ID NO: 595 are provided in FIG. 8 and in the Sequence Listing.

[0121] In some cases, a biomass-modulating polypeptide has an amino acid sequence with at least 45% sequence identity, e.g., 50%, 52%, 56%, 59%, 61%, 65%, 70%, 75%, 80%, 85%, 90%, 95%, 97%, 98%, or 99% sequence identity, to the amino acid sequence set forth in SEQ ID NO: 77. Amino acid sequences of polypeptides having greater than 45% sequence identity to the polypeptide set forth in SEQ ID NO: 77 are provided in FIG. 9 and in the Sequence Listing.

[0122] In some cases, a biomass-modulating polypeptide has an amino acid sequence with at least 45% sequence identity, e.g., 50%, 52%, 56%, 59%, 61%, 65%, 70%, 75%, 80%, 85%, 90%, 95%, 97%, 98%, or 99% sequence identity, to the amino acid sequence set forth in SEQ ID NO: 209. Amino acid sequences of polypeptides having greater than 45% sequence identity to the polypeptide set forth in SEQ ID NO: 209 are provided in FIG. 10 and in the Sequence Listing.

[0123] In some cases, a biomass-modulating polypeptide has an amino acid sequence with at least 45% sequence identity, e.g., 50%, 52%, 56%, 59%, 61%, 65%, 70%, 75%, 80%, 85%, 90%, 95%, 97%, 98%, or 99% sequence identity, to the amino acid sequence set forth in SEQ ID NO: 426. Amino acid sequences of polypeptides having greater than 45% sequence identity to the polypeptide set forth in SEQ ID NO: 426 are provided in FIG. 11 and in the Sequence Listing.

### E. Other Sequences

[0124] It should be appreciated that a biomass-modulating polypeptide can include additional amino acids that are not involved in biomass modulation, and thus such a polypeptide can be longer than would otherwise be the case. For example, a biomass-modulating polypeptide can include a purification tag, a chloroplast transit peptide, a mitochondrial transit peptide, an amyloplast peptide, or a leader sequence added to the amino or carboxy terminus. In some embodiments, a biomass-modulating polypeptide includes an amino acid sequence that functions as a reporter, e.g., a green fluorescent protein or yellow fluorescent protein.

### III. NUCLEIC ACIDS

[0125] Nucleic acids described herein include nucleic acids that are effective to modulate biomass levels when transcribed in a plant or plant cell. Such nucleic acids include, without limitation, those that encode a biomass-modulating polypeptide and those that can be used to inhibit expression of a biomass-modulating polypeptide via a nucleic acid based method.

### A. Nucleic Acids Encoding Biomass-Modulating Polypeptides

[0126] Nucleic acids encoding biomass-modulating polypeptides are described herein. Examples of such nucleic acids include SEQ ID NOs: 3, 5, 7, 9, 19, 21, 23, 26, 28, 31, 35, 42, 44, 46, 48, 52, 55, 57, 60, 62, 65, 67, 69, 73, 76, 78, 80, 83, 85, 89, 91, 93, 95, 97, 99, 101, 103, 105, 107, 109, 111, 113, 116, 119, 124, 126, 128, 130, 134, 136, 138, 140, 143, 148, 150, 157, 159, 161, 165, 167, 170, 172, 175, 177, 179, 181, 183, 187, 192, 197, 199, 201, 205, 208, 211, 213, 215, 217, 219, 221, 223, 225, 227, 229, 231, 233, 235, 237, 240, 252, 254, 256, 258, 260, 262, 265, 267, 270, 272, 274, 277, 280, 284, 286, 288, 290, 293, 301, 303, 307, 309, 313, 316, 318, 322, 325, 328, 330, 333, 335, 339, 341, 344, 346, 348, 350, 352, 355, 358, 360, 362, 364, 366, 368, 370, 373, 375, 377, 379, 381, 383, 385, 387, 389, 392, 394, 396, 398, 400, 402, 404, 408, 410, 412, 414, 419, 423, 425, 427, 432, 434, 441, 443, 445, 451, 458, 460, 462, 465, 469, 471, 473, 475, 477, 481, 485, 487, 489, 491, 494, 496, 498, 505, 507, 510, 512, 514, 520, 522, 524, 527, 530, 533, 535, 538, 542, 544, 546, 548, 553, 555, 557, 559, 561, 564, 566, 568, 570, 572, 576, 578, 580, 582, 584, 586, 588, 590, 592, 594, 596, 599, 601, 607, 612, 614, 617, 621, 624, 626, 628, 631, 635, 640, 644, 646, 648, 650, 654, 656, 658, 661, 663, 665, 668, 678, 679, 680, 681, 682, 683, 684, 685, 686, 687, 688, 690, 692, 694, or 696 as described in more detail below. A nucleic acid also can be a fragment that is at least 40% (e.g., at least 45, 50, 55, 60, 65, 70, 75, 80, 85, 90, 95, or 99%) of the length of the full-length nucleic acid set forth in SEQ ID NOs: 3, 5, 7, 9, 19, 21, 23, 26, 28, 31, 35, 42, 44, 46, 48, 52, 55, 57, 60, 62, 65, 67, 69, 73, 76, 78, 80, 83, 85, 89, 91, 93, 95, 97, 99, 101, 103, 105, 107, 109, 111, 113, 116, 119, 124, 126, 128, 130, 134, 136, 138, 140, 143, 148, 150, 157, 159, 161, 165, 167, 170, 172, 175, 177, 179, 181, 183, 187, 192, 197, 199, 201, 205, 208, 211, 213, 215, 217, 219, 221, 223, 225, 227, 229, 231, 233, 235, 237, 240, 252, 254, 256, 258, 260, 262, 265, 267, 270, 272, 274, 277, 280, 284, 286, 288, 290, 293, 301, 355, 358, 360, 362, 364, 366, 368, 370, 373, 375, 377, 379, 381, 383, 385, 387, 389, 392, 394, 396, 398, 400, 402, 404, 408, 410, 412, 414, 419, 423, 425, 427, 432, 434, 441, 443, 445, 451, 458, 460, 462, 465, 469, 471, 473, 475, 477, 481, 485, 487, 489, 491, 494, 496, 498, 505, 507, 510, 512, 514, 520, 522, 524, 527, 530, 533, 535, 538, 542, 544, 546, 548, 553, 555, 557, 559, 561, 564, 566, 568, 570, 572, 576, 578, 580, 582, 584, 586, 588, 590, 592, 594, 596, 599, 601, 607, 612, 614, 617, 621, 624, 626, 628, 631, 635, 640, 644, 646, 648, 650, 654, 656, 658, 661, 663, 665, 668, 678, 679, 680, 681, 682, 683, 684, 685, 686, 687, 688, 690, 692, 694, or 696.

[0127] A biomass-modulating nucleic acid can comprise the nucleotide sequence set forth in SEQ ID NO: 553. Alternatively, a biomass-modulating nucleic acid can be a variant of the nucleic acid having the nucleotide sequence set forth in SEQ ID NO: 553. For example, a biomass-modulating nucleic acid can have a nucleotide sequence with at least 80% sequence identity, e.g., 81%, 85%, 90%, 95%, 97%, 98%, or 99% sequence identity, to the nucleotide sequence set forth in SEQ ID NO: 553.

[0128] A biomass-modulating nucleic acid can comprise the nucleotide sequence set forth in SEQ ID NO: 262. Alternatively, a biomass-modulating nucleic acid can be a variant of the nucleic acid having the nucleotide sequence set forth in SEQ ID NO: 262. For example, a biomass-modulating nucleic acid can have a nucleotide sequence with at least 80% sequence identity, e.g., 81%, 85%, 90%, 95%, 97%, 98%, or 99% sequence identity, to the nucleotide sequence set forth in SEQ ID NO: 262.

[0129] A biomass-modulating nucleic acid can comprise the nucleotide sequence set forth in SEQ ID NO: 116. Alternatively, a biomass-modulating nucleic acid can be a variant of the nucleic acid having the nucleotide sequence set forth in SEQ ID NO: 116. For example, a biomass-modulating nucleic acid can have a nucleotide sequence with at least 80% sequence identity, e.g., 81%, 85%, 90%, 95%, 97%, 98%, or 99% sequence identity, to the nucleotide sequence set forth in SEQ ID NO: 116.

[0130] A biomass-modulating nucleic acid can comprise the nucleotide sequence set forth in SEQ ID NO: 678. Alternatively, a biomass-modulating nucleic acid can be a variant of the nucleic acid having the nucleotide sequence set forth in SEQ ID NO: 678. For example, a biomass-modulating nucleic acid can have a nucleotide sequence with at least 80% sequence identity, e.g., 81%, 85%, 90%, 95%, 97%, 98%, or 99% sequence identity, to the nucleotide sequence set forth in SEQ ID NO: 678.

[0131] A biomass-modulating nucleic acid can comprise the nucleotide sequence set forth in SEQ ID NO: 644. Alternatively, a biomass-modulating nucleic acid can be a variant of the nucleic acid having the nucleotide sequence set forth in SEQ ID NO: 644. For example, a biomass-modulating nucleic acid can have a nucleotide sequence with at least 80% sequence identity, e.g., 81%, 85%, 90%, 95%, 97%, 98%, or 99% sequence identity, to the nucleotide sequence set forth in SEQ ID NO: 644.

[0132] A biomass-modulating nucleic acid can comprise the nucleotide sequence set forth in SEQ ID NO: 252. Alternatively, a biomass-modulating nucleic acid can be a variant of the nucleic acid having the nucleotide sequence set forth in SEQ ID NO: 252. For example, a biomass-modulating nucleic acid can have a nucleotide sequence with at least 80% sequence identity, e.g., 81%, 85%, 90%, 95%, 97%, 98%, or 99% sequence identity, to the nucleotide sequence set forth in SEQ ID NO: 252.

[0133] A biomass-modulating nucleic acid can comprise the nucleotide sequence set forth in SEQ ID NO: 322. Alternatively, a biomass-modulating nucleic acid can be a variant of the nucleic acid having the nucleotide sequence set forth in SEQ ID NO: 322. For example, a biomass-modulating nucleic acid can have a nucleotide sequence with at least 80% sequence identity, e.g., 81%, 85%, 90%, 95%, 97%, 98%, or 99% sequence identity, to the nucleotide sequence set forth in SEQ ID NO: 322.

[0134] A biomass-modulating nucleic acid can comprise the nucleotide sequence set forth in SEQ ID NO: 594. Alternatively, a biomass-modulating nucleic acid can be a variant of the nucleic acid having the nucleotide sequence set forth in SEQ ID NO: 594. For example, a biomass-modulating nucleic acid can have a nucleotide sequence with at least 80% sequence identity, e.g., 81%, 85%, 90%, 95%, 97%, 98%, or 99% sequence identity, to the nucleotide sequence set forth in SEQ ID NO: 594.

[0135] A biomass-modulating nucleic acid can comprise the nucleotide sequence set forth in SEQ ID NO: 76. Alternatively, a biomass-modulating nucleic acid can be a variant of the nucleic acid having the nucleotide sequence set forth in SEQ ID NO: 76. For example, a biomass-modulating nucleic acid can have a nucleotide sequence with at least 80% sequence identity, e.g., 81%, 85%, 90%, 95%, 97%, 98%, or 99% sequence identity, to the nucleotide sequence set forth in SEQ ID NO: 76.

[0136] A biomass-modulating nucleic acid can comprise the nucleotide sequence set forth in SEQ ID NO: 208. Alternatively, a biomass-modulating nucleic acid can be a variant of the nucleic acid having the nucleotide sequence set forth in SEQ ID NO: 208. For example, a biomass-modulating nucleic acid can have a nucleotide sequence with at least 80% sequence identity, e.g., 81%, 85%, 90%, 95%, 97%, 98%, or 99% sequence identity, to the nucleotide sequence set forth in SEQ ID NO: 208.

[0137] A biomass-modulating nucleic acid can comprise the nucleotide sequence set forth in SEQ ID NO: 425. Alternatively, a biomass-modulating nucleic acid can be a variant of the nucleic acid having the nucleotide sequence set forth in SEQ ID NO: 425. For example, a biomass-modulating nucleic acid can have a nucleotide sequence with at least 80% sequence identity, e.g., 81%, 85%, 90%, 95%, 97%, 98%, or 99% sequence identity, to the nucleotide sequence set forth in SEQ ID NO: 425.

[0138] Isolated nucleic acid molecules can be produced by standard techniques. For example, polymerase chain reaction (PCR) techniques can be used to obtain an isolated nucleic acid containing a nucleotide sequence described herein. PCR can be used to amplify specific sequences from DNA as well as RNA, including sequences from total genomic DNA or total cellular RNA. Various PCR methods are described, for example, in PCR Primer: A Laboratory Manual, Dieffenbach and Dveksler, eds., Cold Spring Harbor Laboratory Press, 1995. Generally, sequence information from the ends of the region of interest or beyond is employed to design oligonucleotide primers that are identical or similar in sequence to opposite strands of the template to be amplified. Various PCR strategies also are available by which site-specific nucleotide sequence modifications can be introduced into a template nucleic acid. Isolated nucleic acids also can be chemically synthesized, either as a single nucleic acid molecule (e.g., using automated DNA synthesis in the 3′ to 5′ direction using phosphoramidite technology) or as a series of oligonucleotides. For example, one or more pairs of long oligonucleotides (e.g., >100 nucleotides) can be synthesized that contain the desired sequence, with each pair containing a short segment of complementarity (e.g., about 15 nucleotides) such that a duplex is formed when the oligonucleotide pair is annealed. DNA polymerase is used to extend the oligonucleotides, resulting in a single, double-stranded nucleic acid molecule per oligonucleotide pair, which then can be ligated into a vector. Isolated nucleic acids of the invention also can be obtained by mutagenesis of, e.g., a naturally occurring DNA.

### B. Use of Nucleic Acids to Modulate Expression of Polypeptides

### i. Expression of a Biomass-Modulating Polypeptide

[0139] A nucleic acid encoding one of the biomass-modulating polypeptides described herein can be used to express the polypeptide in a plant species of interest, typically by transforming a plant cell with a nucleic acid having the coding sequence for the polypeptide operably linked in sense orientation to one or more regulatory regions. It will be appreciated that because of the degeneracy of the genetic code, a number of nucleic acids can encode a particular biomass-modulating polypeptide; i.e., for many amino acids, there is more than one nucleotide triplet that serves as the codon for the amino acid. Thus, codons in the coding sequence for a given biomass-modulating polypeptide can be modified such that optimal expression in a particular plant species is obtained, using appropriate codon bias tables for that species.

[0140] In some cases, expression of a biomass-modulating polypeptide inhibits one or more functions of an endogenous polypeptide. For example, a nucleic acid that encodes a dominant negative polypeptide can be used to inhibit protein function. A dominant negative polypeptide typically is mutated or truncated relative to an endogenous wild type polypeptide, and its presence in a cell inhibits one or more functions of the wild type polypeptide in that cell, i.e., the dominant negative polypeptide is genetically dominant and confers a loss of function. The mechanism by which a dominant negative polypeptide confers such a phenotype can vary but often involves a protein-protein interaction or a protein-DNA interaction. For example, a dominant negative polypeptide can be an enzyme that is truncated relative to a native wild type enzyme, such that the truncated polypeptide retains domains involved in binding a first protein but lacks domains involved in binding a second protein. The truncated polypeptide is thus unable to properly modulate the activity of the second protein. Sec, e.g., US 2007/0056058. As another example, a point mutation that results in a non-conservative amino acid substitution in a catalytic domain can result in a dominant negative polypeptide. Sec, e.g., US 2005/032221. As another example, a dominant negative polypeptide can be a transcription factor that is truncated relative to a native wild type transcription factor, such that the truncated polypeptide retains the DNA binding domain(s) but lacks the activation domain(s). Such a truncated polypeptide can inhibit the wild type transcription factor from binding DNA, thereby inhibiting transcription activation.

### ii. Inhibition of Expression of a Biomass-Modulating Polypeptide

[0141] Polynucleotides and recombinant constructs described herein can be used to inhibit expression of a biomass-modulating polypeptide in a plant species of interest. See, e.g., Matzke and Birchler, Nature Reviews Genetics 6:24-35 (2005); Akashi et al., Nature Reviews Mol. Cell Biology 6:413-422 (2005); Mittal, Nature Reviews Genetics 5:355-365 (2004); and Nature Reviews RNA interference collection, October 2005 on the World Wide Web at nature.com/reviews/focus/mai. A number of nucleic acid based methods, including antisense RNA, ribozyme directed RNA cleavage, post-transcriptional gene silencing (PTGS), e.g., RNA interference (RNAi), and transcriptional gene silencing (TGS) are known to inhibit gene expression in plants. Suitable polynucleotides include full-length nucleic acids encoding biomass-modulating polypeptides or fragments of such full-length nucleic acids. In some embodiments, a complement of the full-length nucleic acid or a fragment thereof can be used. Typically, a fragment is at least 10 nucleotides, e.g., at least 12, 13, 14, 15, 16, 17, 18, 19, 20, 21, 22, 23, 24, 25, 26, 27, 30, 35, 40, 50, 80, 100, 200, 500 nucleotides or more. Generally, higher homology can be used to compensate for the use of a shorter sequence.

[0142] Antisense technology is one well-known method. In this method, a nucleic acid of a gene to be repressed is cloned and operably linked to a regulatory region and a transcription termination sequence so that the antisense strand of RNA is transcribed. The recombinant construct is then transformed into plants, as described herein, and the antisense strand of RNA is produced. The nucleic acid need not be the entire sequence of the gene to be repressed, but typically will be substantially complementary to at least a portion of the sense strand of the gene to be repressed.

[0143] In another method, a nucleic acid can be transcribed into a ribozyme, or catalytic RNA, that affects expression of an mRNA. See, U.S. Pat. No. 6,423,885. Ribozymes can be designed to specifically pair with virtually any target RNA and cleave the phosphodiester backbone at a specific location, thereby functionally inactivating the target RNA. Heterologous nucleic acids can encode ribozymes designed to cleave particular mRNA transcripts, thus preventing expression of a polypeptide. Hammerhead ribozymes are useful for destroying particular mRNAs, although various ribozymes that cleave mRNA at site-specific recognition sequences can be used. Hammerhead ribozymes cleave mRNAs at locations dictated by flanking regions that form complementary base pairs with the target mRNA. The sole requirement is that the target RNA contains a 5′-UG-3′ nucleotide sequence. The construction and production of hammerhead ribozymes is known in the art. See, for example, U.S. Pat. No. 5,254,678 and WO 02/46449 and references cited therein. Hammerhead ribozyme sequences can be embedded in a stable RNA such as a transfer RNA (tRNA) to increase cleavage efficiency in vivo. Perriman et al., Proc. Natl. Acad. Sci. USA, 92(13):6175-6179 (1995); de Feyter and Gaudron, Methods in Molecular Biology, Vol. 74, Chapter 43, “Expressing Ribozymes in Plants”, Edited by Turner, P. C., Humana Press Inc., Totowa, NJ. RNA endoribonucleases which have been described, such as the one that occurs naturally in Tetrahymena thermophila, can be useful. See, for example, U.S. Pat. Nos. 4,987,071 and 6,423,885.

[0144] PTGS, e.g., RNAi, can also be used to inhibit the expression of a gene. For example, a construct can be prepared that includes a sequence that is transcribed into an RNA that can anneal to itself, e.g., a double stranded RNA having a stem-loop structure. In some embodiments, one strand of the stem portion of a double stranded RNA comprises a sequence that is similar or identical to the sense coding sequence or a fragment thereof of a biomass-modulating polypeptide, and that is from about 10 nucleotides to about 2,500 nucleotides in length. The length of the sequence that is similar or identical to the sense coding sequence can be from 10 nucleotides to 500 nucleotides, from 15 nucleotides to 300 nucleotides, from 20 nucleotides to 100 nucleotides, or from 25 nucleotides to 100 nucleotides. The other strand of the stem portion of a double stranded RNA comprises a sequence that is similar or identical to the antisense strand or a fragment thereof of the coding sequence of the biomass-modulating polypeptide, and can have a length that is shorter, the same as, or longer than the corresponding length of the sense sequence. In some cases, one strand of the stem portion of a double stranded RNA comprises a sequence that is similar or identical to the 3′ or 5′ untranslated region, or a fragment thereof, of an mRNA encoding a biomass-modulating polypeptide, and the other strand of the stem portion of the double stranded RNA comprises a sequence that is similar or identical to the sequence that is complementary to the 3′ or 5′ untranslated region, respectively, or a fragment thereof, of the mRNA encoding the biomass-modulating polypeptide. In other embodiments, one strand of the stem portion of a double stranded RNA comprises a sequence that is similar or identical to the sequence of an intron, or a fragment thereof, in the pre-mRNA encoding a biomass-modulating polypeptide, and the other strand of the stem portion comprises a sequence that is similar or identical to the sequence that is complementary to the sequence of the intron, or a fragment thereof, in the pre-mRNA.

[0145] The loop portion of a double stranded RNA can be from 3 nucleotides to 5,000 nucleotides, e.g., from 3 nucleotides to 25 nucleotides, from 15 nucleotides to 1,000 nucleotides, from 20 nucleotides to 500 nucleotides, or from 25 nucleotides to 200 nucleotides. The loop portion of the RNA can include an intron or a fragment thereof. A double stranded RNA can have zero, one, two, three, four, five, six, seven, eight, nine, ten, or more stem-loop structures.

[0146] A construct including a sequence that is operably linked to a regulatory region and a transcription termination sequence, and that is transcribed into an RNA that can form a double stranded RNA, is transformed into plants as described herein. Methods for using RNAi to inhibit the expression of a gene are known to those of skill in the art. See, e.g., U.S. Pat. Nos. 5,034,323; 6,326,527; 6,452,067; 6,573,099; 6,753,139; and 6,777,588. See also WO 97/01952; WO 98/53083; WO 99/32619; WO 98/36083; and U.S. Patent Publications 20030175965, 20030175783, 20040214330, and 20030180945.

[0147] Constructs containing regulatory regions operably linked to nucleic acid molecules in sense orientation can also be used to inhibit the expression of a gene. The transcription product can be similar or identical to the sense coding sequence, or a fragment thereof, of a biomass-modulating polypeptide. The transcription product also can be unpolyadenylated, lack a 5′ cap structure, or contain an unspliceable intron. Methods of inhibiting gene expression using a full-length cDNA as well as a partial cDNA sequence are known in the art. See, e.g., U.S. Pat. No. 5,231,020.

[0148] In some embodiments, a construct containing a nucleic acid having at least one strand that is a template for both sense and antisense sequences that are complementary to each other is used to inhibit the expression of a gene. The sense and antisense sequences can be part of a larger nucleic acid molecule or can be part of separate nucleic acid molecules having sequences that are not complementary. The sense or antisense sequence can be a sequence that is identical or complementary to the sequence of an mRNA, the 3′ or 5′ untranslated region of an mRNA, or an intron in a pre-mRNA encoding a biomass-modulating polypeptide, or a fragment of such sequences. In some embodiments, the sense or antisense sequence is identical or complementary to a sequence of the regulatory region that drives transcription of the gene encoding a biomass-modulating polypeptide. In each case, the sense sequence is the sequence that is complementary to the antisense sequence.

[0149] The sense and antisense sequences can be a length greater than about 10 nucleotides (e.g., 12, 13, 14, 15, 16, 17, 18, 19, 20, 21, 22, 23, 24, 25, 26, 27, 28, 29, 30, or more nucleotides). For example, an antisense sequence can be 21 or 22 nucleotides in length. Typically, the sense and antisense sequences range in length from about 15 nucleotides to about 30 nucleotides, e.g., from about 18 nucleotides to about 28 nucleotides, or from about 21 nucleotides to about 25 nucleotides.

[0150] In some embodiments, an antisense sequence is a sequence complementary to an mRNA sequence, or a fragment thereof, encoding a biomass-modulating polypeptide described herein. The sense sequence complementary to the antisense sequence can be a sequence present within the mRNA of the biomass-modulating polypeptide. Typically, sense and antisense sequences are designed to correspond to a 15-30 nucleotide sequence of a target mRNA such that the level of that target mRNA is reduced.

[0151] In some embodiments, a construct containing a nucleic acid having at least one strand that is a template for more than one sense sequence (e.g., 2, 3, 4, 5, 6, 7, 8, 9, 10 or more sense sequences) can be used to inhibit the expression of a gene. Likewise, a construct containing a nucleic acid having at least one strand that is a template for more than one antisense sequence (e.g., 2, 3, 4, 5, 6, 7, 8, 9, 10 or more antisense sequences) can be used to inhibit the expression of a gene. For example, a construct can contain a nucleic acid having at least one strand that is a template for two sense sequences and two antisense sequences. The multiple sense sequences can be identical or different, and the multiple antisense sequences can be identical or different. For example, a construct can have a nucleic acid having one strand that is a template for two identical sense sequences and two identical antisense sequences that are complementary to the two identical sense sequences. Alternatively, an isolated nucleic acid can have one strand that is a template for (1) two identical sense sequences 20 nucleotides in length, (2) one antisense sequence that is complementary to the two identical sense sequences 20 nucleotides in length, (3) a sense sequence 30 nucleotides in length, and (4) three identical antisense sequences that are complementary to the sense sequence 30 nucleotides in length. The constructs provided herein can be designed to have a suitable arrangement of sense and antisense sequences. For example, two identical sense sequences can be followed by two identical antisense sequences or can be positioned between two identical antisense sequences.

[0152] A nucleic acid having at least one strand that is a template for one or more sense and/or antisense sequences can be operably linked to a regulatory region to drive transcription of an RNA molecule containing the sense and/or antisense sequence(s). In addition, such a nucleic acid can be operably linked to a transcription terminator sequence, such as the terminator of the nopaline synthase (nos) gene. In some cases, two regulatory regions can direct transcription of two transcripts: one from the top strand, and one from the bottom strand. See, for example, Yan et al., Plant Physiol., 141:1508-1518 (2006). The two regulatory regions can be the same or different. The two transcripts can form double-stranded RNA molecules that induce degradation of the target RNA. In some cases, a nucleic acid can be positioned within a T-DNA or plant-derived transfer DNA (P-DNA) such that the left and right T-DNA border sequences or the left and right border-like sequences of the P-DNA flank, or are on either side of, the nucleic acid. See, US 2006/0265788. The nucleic acid sequence between the two regulatory regions can be from about 15 to about 300 nucleotides in length. In some embodiments, the nucleic acid sequence between the two regulatory regions is from about 15 to about 200 nucleotides in length, from about 15 to about 100 nucleotides in length, from about 15 to about 50 nucleotides in length, from about 18 to about 50 nucleotides in length, from about 18 to about 40 nucleotides in length, from about 18 to about 30 nucleotides in length, or from about 18 to about 25 nucleotides in length.

[0153] In some nucleic-acid based methods for inhibition of gene expression in plants, a suitable nucleic acid can be a nucleic acid analog. Nucleic acid analogs can be modified at the base moiety, sugar moiety, or phosphate backbone to improve, for example, stability, hybridization, or solubility of the nucleic acid. Modifications at the base moiety include deoxyuridine for deoxythymidine, and 5-methyl-2′-deoxycytidine and 5-bromo-2′-deoxycytidine for deoxycytidine. Modifications of the sugar moiety include modification of the 2′ hydroxyl of the ribose sugar to form 2′-O-methyl or 2′-O-allyl sugars. The deoxyribose phosphate backbone can be modified to produce morpholino nucleic acids, in which each base moiety is linked to a six-membered morpholino ring, or peptide nucleic acids, in which the deoxyphosphate backbone is replaced by a pseudopeptide backbone and the four bases are retained. See, for example, Summerton and Weller, Antisense Nucleic Acid Drug Dev., 7:187-195 (1997); Hyrup et al., Bioorgan. Med. Chem., 4:5-23 (1996). In addition, the deoxyphosphate backbone can be replaced with, for example, a phosphorothioate or phosphorodithioate backbone, a phosphoroamidite, or an alkyl phosphotriester backbone.

### C. Constructs/Vectors

[0154] Recombinant constructs provided herein can be used to transform plants or plant cells in order to modulate biomass levels. A recombinant nucleic acid construct can comprise a nucleic acid encoding a biomass-modulating polypeptide as described herein, operably linked to a regulatory region suitable for expressing the biomass-modulating polypeptide in the plant or cell. Thus, a nucleic acid can comprise a coding sequence that encodes a biomass-modulating polypeptides as set forth in SEQ ID NOs: 1, 2, 4, 6, 8, 10, 11, 12, 13, 14, 15, 16, 17, 18, 20, 22, 24, 25, 27, 29, 30, 32, 33, 34, 36, 37, 38, 39, 40, 41, 43, 45, 47, 49, 50, 51, 53, 54, 56, 58, 59, 61, 63, 64, 66, 68, 70, 71, 72, 74, 75, 77, 79, 81, 82, 84, 86, 87, 88, 90, 92, 94, 96, 98, 100, 102, 104, 106, 108, 110, 112, 114, 115, 117, 118, 120, 121, 122, 123, 125, 127, 129, 131, 132, 133, 135, 137, 139, 141, 142, 144, 145, 146, 147, 149, 151, 152, 153, 154, 155, 156, 158, 160, 162, 163, 164, 166, 168, 169, 171, 173, 174, 176, 178, 180, 182, 184, 185, 186, 188, 189, 190, 191, 193, 194, 195, 196, 198, 200, 202, 203, 204, 206, 207, 209, 210, 212, 214, 216, 218, 220, 222, 224, 226, 228, 230, 232, 234, 236, 238, 239, 241, 242, 243, 244, 245, 246, 247, 248, 249, 250, 251, 253, 255, 257, 259, 261, 263, 264, 266, 268, 269, 271, 273, 275, 276, 278, 279, 281, 282, 283, 285, 287, 289, 291, 292, 294, 295, 296, 297, 298, 299, 300, 302, 304, 305, 306, 308, 310, 311, 312, 314, 315, 317, 319, 320, 321, 323, 324, 326, 327, 329, 331, 332, 334, 336, 337, 338, 340, 342, 343, 345, 347, 349, 351, 353, 354, 356, 357, 359, 361, 363, 365, 367, 369, 371, 372, 374, 376, 378, 380, 382, 384, 386, 388, 390, 391, 393, 395, 397, 399, 401, 403, 405, 406, 407, 409, 411, 413, 415, 416, 417, 418, 420, 421, 422, 424, 426, 428, 429, 430, 431, 433, 435, 436, 437, 438, 439, 440, 442, 444, 446, 447, 448, 449, 450, 452, 453, 454, 455, 456, 457, 459, 461, 463, 464, 466, 467, 468, 470, 472, 474, 476, 478, 479, 480, 482, 483, 484, 486, 488, 490, 492, 493, 495, 497, 499, 500, 501, 502, 503, 504, 506, 508, 509, 511, 513, 515, 516, 517, 518, 519, 521, 523, 525, 526, 528, 529, 531, 532, 534, 536, 537, 539, 540, 541, 543, 545, 547, 549, 550, 551, 552, 554, 556, 558, 560, 562, 563, 565, 567, 569, 571, 573, 574, 575, 577, 579, 581, 583, 585, 587, 589, 591, 593, 595, 597, 598, 600, 602, 603, 604, 605, 606, 608, 609, 610, 611, 613, 615, 616, 618, 619, 620, 622, 623, 625, 627, 629, 630, 632, 633, 634, 636, 637, 638, 639, 641, 642, 643, 645, 647, 649, 651, 652, 653, 655, 657, 659, 660, 662, 664, 666, 667, 669, 670, 671, 672, 673, 674, 675, 676, 677, 689, 691, 693, 695, or 697. Examples of nucleic acids encoding biomass-modulating polypeptides are set forth in SEQ ID NO: 3, 5, 7, 9, 19, 21, 23, 26, 28, 31, 35, 42, 44, 46, 48, 52, 55, 57, 60, 62, 65, 67, 69, 73, 76, 78, 80, 83, 85, 89, 91, 93, 95, 97, 99, 101, 103, 105, 107, 109, 111, 113, 116, 119, 124, 126, 128, 130, 134, 136, 138, 140, 143, 148, 150, 157, 159, 161, 165, 167, 170, 172, 175, 177, 179, 181, 183, 187, 192, 197, 199, 201, 205, 208, 211, 213, 215, 217, 219, 221, 223, 225, 227, 229, 231, 233, 235, 237, 240, 252, 254, 256, 258, 260, 262, 265, 267, 270, 272, 274, 277, 280, 284, 286, 288, 290, 293, 301, 303, 307, 309, 313, 316, 318, 322, 325, 328, 330, 333, 335, 339, 341, 344, 346, 348, 350, 352, 355, 358, 360, 362, 364, 366, 368, 370, 373, 375, 377, 379, 381, 383, 385, 387, 389, 392, 394, 396, 398, 400, 402, 404, 408, 410, 412, 414, 419, 423, 425, 427, 432, 434, 441, 443, 445, 451, 458, 460, 462, 465, 469, 471, 473, 475, 477, 481, 485, 487, 489, 491, 494, 496, 498, 505, 507, 510, 512, 514, 520, 522, 524, 527, 530, 533, 535, 538, 542, 544, 546, 548, 553, 555, 557, 559, 561, 564, 566, 568, 570, 572, 576, 578, 580, 582, 584, 586, 588, 590, 592, 594, 596, 599, 601, 607, 612, 614, 617, 621, 624, 626, 628, 631, 635, 640, 644, 646, 648, 650, 654, 656, 658, 661, 663, 665, 668, 678, 679, 680, 681, 682, 683, 684, 685, 686, 687, 688, 690, 692, 694, or 696, or in the Sequence Listing. The biomass-modulating polypeptide encoded by a recombinant nucleic acid can be a native biomass-modulating polypeptide, or can be heterologous to the cell. In some cases, the recombinant construct contains a nucleic acid that inhibits expression of a biomass-modulating polypeptide, operably linked to a regulatory region. Examples of suitable regulatory regions are described in the section entitled “Regulatory Regions.”

[0155] Vectors containing recombinant nucleic acid constructs such as those described herein also are provided. Suitable vector backbones include, for example, those routinely used in the art such as plasmids, viruses, artificial chromosomes, BACs, YACs, or PACs. Suitable expression vectors include, without limitation, plasmids and viral vectors derived from, for example, bacteriophage, baculoviruses, and retroviruses. Numerous vectors and expression systems are commercially available from such corporations as Novagen® (Madison, WI), Clontech® (Palo Alto, CA), Stratagene® (La Jolla, CA), and Invitrogen/Life Technologies® (Carlsbad, CA).

[0156] The vectors provided herein also can include, for example, origins of replication, scaffold attachment regions (SARs), and/or markers. A marker gene can confer a selectable phenotype on a plant cell. For example, a marker can confer biocide resistance, such as resistance to an antibiotic (e.g., kanamycin, G418, bleomycin, or hygromycin), or an herbicide (e.g., glyphosate, chlorsulfuron or phosphinothricin). In addition, an expression vector can include a tag sequence designed to facilitate manipulation or detection (e.g., purification or localization) of the expressed polypeptide. Tag sequences, such as luciferase, ß-glucuronidase (GUS), green fluorescent protein (GFP), glutathione S-transferase (GST), polyhistidine, c-myc, hemagglutinin, or Flag™ tag (Kodak, New Haven, CT) sequences typically are expressed as a fusion with the encoded polypeptide. Such tags can be inserted anywhere within the polypeptide, including at either the carboxyl or amino terminus.

### D. Regulatory Regions

[0157] The choice of regulatory regions to be included in a recombinant construct depends upon several factors, including, but not limited to, efficiency, selectability, inducibility, desired expression level, and cell-or tissue-preferential expression. It is a routine matter for one of skill in the art to modulate the expression of a coding sequence by appropriately selecting and positioning regulatory regions relative to the coding sequence. Transcription of a nucleic acid can be modulated in a similar manner.

[0158] Some suitable regulatory regions initiate transcription only, or predominantly, in certain cell types. Methods for identifying and characterizing regulatory regions in plant genomic DNA are known, including, for example, those described in the following references: Jordano et al., Plant Cell, 1:855-866 (1989); Bustos et al., Plant Cell, 1:839-854 (1989); Green et al., EMBO J., 7:4035-4044 (1988); Meier et al., Plant Cell, 3:309-316 (1991); and Zhang et al., Plant Physiology, 110:1069-1079 (1996).

[0159] Examples of various classes of regulatory regions are described below. Some of the regulatory regions indicated below as well as additional regulatory regions are described in more detail in U.S. Patent Application Ser. Nos. 60/505,689; 60/518,075; 60/544,771; 60/558,869; 60/583,691; 60/619,181; 60/637,140; 60/757,544; 60/776,307; Ser. No. 10/957,569; Ser. No. 11/058,689; Ser. No. 11/172,703; Ser. No. 11/208,308; Ser. No. 11/274,890; 60/583,609; 60/612,891; Ser. No. 11/097,589; Ser. No. 11/233,726; Ser. No. 11/408,791; Ser. No. 11/414,142; Ser. No. 10/950,321; Ser. No. 11/360,017; PCT/US05/011105; PCT/US05/23639; PCT/US05/034308; PCT/US05/034343; and PCT/US06/038236; PCT/US06/040572; and PCT/US07/62762.

[0160] For example, the sequences of regulatory regions p326, YP0144, YP0190, p13879, YP0050, p32449, 21876, YP0158, YP0214, YP0380, PT0848, PT0633, YP0128, YP0275, PT0660, PT0683, PT0758, PT0613, PT0672, PT0688, PT0837, YP0092, PT0676, PT0708, YP0396, YP0007, YP0111, YP0103, YP0028, YP0121, YP0008, YP0039, YP0115, YP0119, YP0120, YP0374, YP0101, YP0102, YP0110, YP0117, YP0137, YP0285, YP0212, YP0097, YP0107, YP0088, YP0143, YP0156, PT0650, PT0695, PT0723, PT0838, PT0879, PT0740, PT0535, PT0668, PT0886, PT0585, YP0381, YP0337, PT0710, YP0356, YP0385, YP0384, YP0286, YP0377, PD1367, PT0863, PT0829, PT0665, PT0678, YP0086, YP0188, YP0263, PT0743 and YP0096 are set forth in the sequence listing of PCT/US06/040572; the sequence of regulatory region PT0625 is set forth in the sequence listing of PCT/US05/034343; the sequences of regulatory regions PT0623, YP0388, YP0087, YP0093, YP0108, YP0022 and YP0080 are set forth in the sequence listing of U.S. patent application Ser. No. 11/172,703; the sequence of regulatory region PR0924 is set forth in the sequence listing of PCT/US07/62762; and the sequences of regulatory regions p530c10, pOsFIE2-2, pOsMEA, pOsYp102, and pOsYp285 are set forth in the sequence listing of PCT/US06/038236.

[0161] It will be appreciated that a regulatory region may meet criteria for one classification based on its activity in one plant species, and yet meet criteria for a different classification based on its activity in another plant species.

### i. Broadly Expressing Promoters

[0162] A promoter can be said to be “broadly expressing” when it promotes transcription in many, but not necessarily all, plant tissues. For example, a broadly expressing promoter can promote transcription of an operably linked sequence in one or more of the shoot, shoot tip (apex), and leaves, but weakly or not at all in tissues such as roots or stems. As another example, a broadly expressing promoter can promote transcription of an operably linked sequence in one or more of the stem, shoot, shoot tip (apex), and leaves, but can promote transcription weakly or not at all in tissues such as reproductive tissues of flowers and developing seeds. Non-limiting examples of broadly expressing promoters that can be included in the nucleic acid constructs provided herein include the p326, YP0144, YP0190, p13879, YP0050, p32449, 21876, YP0158, YP0214, YP0380, PT0848, and PT0633 promoters. Additional examples include the cauliflower mosaic virus (CaMV) 35S promoter, the mannopine synthase (MAS) promoter, the 1′ or 2′ promoters derived from T-DNA of Agrobacterium tumefaciens, the figwort mosaic virus 34S promoter, actin promoters such as the rice actin promoter, and ubiquitin promoters such as the maize ubiquitin-1 promoter. In some cases, the CaMV 35S promoter is excluded from the category of broadly expressing promoters.

### ii. Root Promoters

[0163] Root-active promoters confer transcription in root tissue, e.g., root endodermis, root epidermis, or root vascular tissues. In some embodiments, root-active promoters are root-preferential promoters, i.e., confer transcription only or predominantly in root tissue. Root-preferential promoters include the YP0128, YP0275, PT0625, PT0660, PT0683, and PT0758 promoters. Other root-preferential promoters include the PT0613, PT0672, PT0688, and PT0837 promoters, which drive transcription primarily in root tissue and to a lesser extent in ovules and/or seeds. Other examples of root-preferential promoters include the root-specific subdomains of the CaMV 35S promoter (Lam et al., Proc. Natl. Acad. Sci. USA, 86:7890-7894 (1989)), root cell specific promoters reported by Conkling et al., Plant Physiol., 93:1203-1211 (1990), and the tobacco RD2 promoter.

### iii. Maturing Endosperm Promoters

[0164] In some embodiments, promoters that drive transcription in maturing endosperm can be useful. Transcription from a maturing endosperm promoter typically begins after fertilization and occurs primarily in endosperm tissue during seed development and is typically highest during the cellularization phase. Most suitable are promoters that are active predominantly in maturing endosperm, although promoters that are also active in other tissues can sometimes be used. Non-limiting examples of maturing endosperm promoters that can be included in the nucleic acid constructs provided herein include the napin promoter, the Arcelin-5 promoter, the phascolin promoter (Bustos et al., Plant Cell, 1(9):839-853 (1989)), the soybean trypsin inhibitor promoter (Riggs et al., Plant Cell, 1(6):609-621 (1989)), the ACP promoter (Baerson et al., Plant Mol. Biol., 22(2):255-267 (1993)), the stearoyl-ACP desaturase promoter (Slocombe et al., Plant Physiol., 104(4):167-176 (1994)), the soybean α′ subunit of β-conglycinin promoter (Chen et al., Proc. Natl. Acad. Sci. USA, 83:8560-8564 (1986)), the olcosin promoter (Hong et al., Plant Mol. Biol., 34(3):549-555 (1997)), and zein promoters, such as the 15 kD zein promoter, the 16 kD zein promoter, 19 kD zein promoter, 22 kD zein promoter and 27 kD zein promoter. Also suitable are the Osgt-1 promoter from the rice glutelin-1 gene (Zheng et al., Mol. Cell Biol., 13:5829-5842 (1993)), the beta-amylase promoter, and the barley hordein promoter. Other maturing endosperm promoters include the YP0092, PT0676, and PT0708 promoters.

### iv. Ovary Tissue Promoters

[0165] Promoters that are active in ovary tissues such as the ovule wall and mesocarp can also be useful, e.g., a polygalacturonidase promoter, the banana TRX promoter, the melon actin promoter, YP0396, and PT0623. Examples of promoters that are active primarily in ovules include YP0007, YP0111, YP0092, YP0103, YP0028, YP0121, YP0008, YP0039, YP0115, YP0119, YP0120, and YP0374.

### v. Embryo Sac/Early Endosperm Promoters

[0166] To achieve expression in embryo sac/early endosperm, regulatory regions can be used that are active in polar nuclei and/or the central cell, or in precursors to polar nuclei, but not in egg cells or precursors to egg cells. Most suitable are promoters that drive expression only or predominantly in polar nuclei or precursors thereto and/or the central cell. A pattern of transcription that extends from polar nuclei into carly endosperm development can also be found with embryo sac/early endosperm-preferential promoters, although transcription typically decreases significantly in later endosperm development during and after the cellularization phase. Expression in the zygote or developing embryo typically is not present with embryo sac/early endosperm promoters.

[0167] Promoters that may be suitable include those derived from the following genes: Arabidopsis viviparous-1 (sec, GenBank No. U93215); Arabidopsis atmycl (sec, Urao, Plant Mol. Biol., 32:571-57 (1996); Conceicao, Plant, 5:493-505 (1994)); Arabidopsis FIE (GenBank No. AF129516); Arabidopsis MEA; Arabidopsis FIS2 (GenBank No. AF096096); and FIE 1.1 (U.S. Pat. No. 6,906,244). Other promoters that may be suitable include those derived from the following genes: maize MAC1 (sec, Sheridan, Genetics, 142:1009-1020 (1996)); maize Cat3 (see, GenBank No. L05934; Abler, Plant Mol. Biol., 22:10131-1038 (1993)). Other promoters include the following Arabidopsis promoters: YP0039, YP0101, YP0102, YP0110, YP0117, YP0119, YP0137, DME, YP0285, and YP0212. Other promoters that may be useful include the following rice promoters: p530c10, pOsFIE2-2, pOsMEA, pOsYp102, and pOs Yp285.

### vi. Embryo Promoters

[0168] Regulatory regions that preferentially drive transcription in zygotic cells following fertilization can provide embryo-preferential expression. Most suitable are promoters that preferentially drive transcription in early stage embryos prior to the heart stage, but expression in late stage and maturing embryos is also suitable. Embryo-preferential promoters include the barley lipid transfer protein (Ltp1) promoter (Plant Cell Rep 20:647-654 (2001)), YP0097, YP0107, YP0088, YP0143, YP0156, PT0650, PT0695, PT0723, PT0838, PT0879, and PT0740.

### vii. Photosynthetic Tissue Promoters

[0169] Promoters active in photosynthetic tissue confer transcription in green tissues such as leaves and stems. Most suitable are promoters that drive expression only or predominantly in such tissues. Examples of such promoters include the ribulose-1,5-bisphosphate carboxylase (RbcS) promoters such as the RbcS promoter from eastern larch (Larix laricina), the pine cab6 promoter (Yamamoto et al., Plant Cell Physiol., 35:773-778 (1994)), the Cab-1 promoter from wheat (Fejes et al., Plant Mol. Biol., 15:921-932 (1990)), the CAB-1 promoter from spinach (Lubberstedt et al., Plant Physiol., 104:997-1006 (1994)), the cab1R promoter from rice (Luan et al., Plant Cell, 4:971-981 (1992)), the pyruvate orthophosphate dikinase (PPDK) promoter from corn (Matsuoka et al., Proc. Natl. Acad. Sci. USA, 90:9586-9590 (1993)), the tobacco Lhcb1*2 promoter (Cerdan et al., Plant Mol. Biol., 33:245-255 (1997)), the Arabidopsis thaliana SUC2 sucrose-H+ symporter promoter (Truernit et al., Planta, 196:564-570 (1995)), and thylakoid membrane protein promoters from spinach (psaD, psaF, psaE, PC, FNR, atpC, atpD, cab, rbcS). Other photosynthetic tissue promoters include PT0535, PT0668, PT0886, YP0144, YP0380 and PT0585.

### viii. Vascular Tissue Promoters

[0170] Examples of promoters that have high or preferential activity in vascular bundles include YP0087, YP0093, YP0108, YP0022, and YP0080. Other vascular tissue-preferential promoters include the glycine-rich cell wall protein GRP 1.8 promoter (Keller and Baumgartner, Plant Cell, 3(10):1051-1061 (1991)), the Commelina yellow mottle virus (CoYMV) promoter (Medberry et al., Plant Cell, 4(2):185-192 (1992)), and the rice tungro bacilliform virus (RTBV) promoter (Dai et al., Proc. Natl. Acad. Sci. USA, 101(2):687-692 (2004)).

### ix. Inducible Promoters

[0171] Inducible promoters confer transcription in response to external stimuli such as chemical agents or environmental stimuli. For example, inducible promoters can confer transcription in response to hormones such as giberellic acid or ethylene, or in response to light or drought. Examples of drought-inducible promoters include YP0380, PT0848, YP0381, YP0337, PT0633, YP0374, PT0710, YP0356, YP0385, YP0396, YP0388, YP0384, PT0688, YP0286, YP0377, PD1367, and PD0901. Examples of nitrogen-inducible promoters include PT0863, PT0829, PT0665, and PT0886. Examples of shade-inducible promoters include PR0924 and PT0678. An example of a promoter induced by salt is rd29A (Kasuga et al. (1999) Nature Biotech 17:287-291).

### x. Basal Promoters

[0172] A basal promoter is the minimal sequence necessary for assembly of a transcription complex required for transcription initiation. Basal promoters frequently include a “TATA box” element that may be located between about 15 and about 35 nucleotides upstream from the site of transcription initiation. Basal promoters also may include a “CCAAT box” element (typically the sequence CCAAT) and/or a GGGCG sequence, which can be located between about 40 and about 200 nucleotides, typically about 60 to about 120 nucleotides, upstream from the transcription start site.

### xi. Stem Promoters

[0173] A stem promoter may be specific to one or more stem tissues or specific to stem and other plant parts. Stem promoters may have high or preferential activity in, for example, epidermis and cortex, vascular cambium, procambium, or xylem. Examples of stem promoters include YP0018 which is disclosed in US20060015970 and CryIA(b) and CryIA(c) (Braga et al. 2003, Journal of New Seeds 5:209-221).

### xii. Other Promoters

[0174] Other classes of promoters include, but are not limited to, shoot-preferential, callus-preferential, trichome cell-preferential, guard cell-preferential such as PT0678, tuber-preferential, parenchyma cell-preferential, and senescence-preferential promoters. Promoters designated YP0086, YP0188, YP0263, PT0758, PT0743, PT0829, YP0119, and YP0096, as described in the above-referenced patent applications, may also be useful.

### xiii. Other Regulatory Regions

[0175] A 5′ untranslated region (UTR) can be included in nucleic acid constructs described herein. A 5′ UTR is transcribed, but is not translated, and lies between the start site of the transcript and the translation initiation codon and may include the +1 nucleotide. A 3′ UTR can be positioned between the translation termination codon and the end of the transcript. UTRs can have particular functions such as increasing mRNA stability or attenuating translation. Examples of 3′ UTRs include, but are not limited to, polyadenylation signals and transcription termination sequences, e.g., a nopaline synthase termination sequence.

[0176] It will be understood that more than one regulatory region may be present in a recombinant polynucleotide, e.g., introns, enhancers, upstream activation regions, transcription terminators, and inducible elements. Thus, for example, more than one regulatory region can be operably linked to the sequence of a polynucleotide encoding a biomass-modulating polypeptide.

[0177] Regulatory regions, such as promoters for endogenous genes, can be obtained by chemical synthesis or by subcloning from a genomic DNA that includes such a regulatory region. A nucleic acid comprising such a regulatory region can also include flanking sequences that contain restriction enzyme sites that facilitate subsequent manipulation.

### IV. TRANSGENIC PLANTS AND PLANT CELLS

### A. Transformation

[0178] The invention also features transgenic plant cells and plants comprising at least one recombinant nucleic acid construct described herein. A plant or plant cell can be transformed by having a construct integrated into its genome, i.e., can be stably transformed. Stably transformed cells typically retain the introduced nucleic acid with each cell division. A plant or plant cell can also be transiently transformed such that the construct is not integrated into its genome. Transiently transformed cells typically lose all or some portion of the introduced nucleic acid construct with each cell division such that the introduced nucleic acid cannot be detected in daughter cells after a sufficient number of cell divisions. Both transiently transformed and stably transformed transgenic plants and plant cells can be useful in the methods described herein.

[0179] Transgenic plant cells used in methods described herein can constitute part or all of a whole plant. Such plants can be grown in a manner suitable for the species under consideration, either in a growth chamber, a greenhouse, or in a field. Transgenic plants can be bred as desired for a particular purpose, e.g., to introduce a recombinant nucleic acid into other lines, to transfer a recombinant nucleic acid to other species, or for further selection of other desirable traits. Alternatively, transgenic plants can be propagated vegetatively for those species amenable to such techniques. As used herein, a transgenic plant also refers to progeny of an initial transgenic plant provided the progeny inherits the transgene. Seeds produced by a transgenic plant can be grown and then selfed (or outcrossed and selfed) to obtain seeds homozygous for the nucleic acid construct.

[0180] Transgenic plants can be grown in suspension culture, or tissue or organ culture. For the purposes of this invention, solid and/or liquid tissue culture techniques can be used. When using solid medium, transgenic plant cells can be placed directly onto the medium or can be placed onto a filter that is then placed in contact with the medium. When using liquid medium, transgenic plant cells can be placed onto a flotation device, e.g., a porous membrane that contacts the liquid medium. A solid medium can be, for example, Murashige and Skoog (MS) medium containing agar and a suitable concentration of an auxin, e.g., 2,4-dichlorophenoxyacetic acid (2,4-D), and a suitable concentration of a cytokinin, e.g., kinetin.

[0181] When transiently transformed plant cells are used, a reporter sequence encoding a reporter polypeptide having a reporter activity can be included in the transformation procedure and an assay for reporter activity or expression can be performed at a suitable time after transformation. A suitable time for conducting the assay typically is about 1-21 days after transformation, e.g., about 1-14 days, about 1-7 days, or about 1-3 days. The use of transient assays is particularly convenient for rapid analysis in different species, or to confirm expression of a heterologous biomass-modulating polypeptide whose expression has not previously been confirmed in particular recipient cells.

[0182] Techniques for introducing nucleic acids into monocotyledonous and dicotyledonous plants are known in the art, and include, without limitation, Agrobacterium-mediated transformation, viral vector-mediated transformation, electroporation and particle gun transformation, e.g., U.S. Pat. Nos. 5,538,880; 5,204,253; 6,329,571 and 6,013,863. If a cell or cultured tissue is used as the recipient tissue for transformation, plants can be regenerated from transformed cultures if desired, by techniques known to those skilled in the art.

### B. Screening/Selection

[0183] A population of transgenic plants can be screened and/or selected for those members of the population that have a trait or phenotype conferred by expression of the transgene. For example, a population of progeny of a single transformation event can be screened for those plants having a desired level of expression of a biomass-modulating polypeptide or nucleic acid. Physical and biochemical methods can be used to identify expression levels. These include Southern analysis or PCR amplification for detection of a polynucleotide; Northern blots, S1 RNase protection, primer-extension, or RT-PCR amplification for detecting RNA transcripts; enzymatic assays for detecting enzyme or ribozyme activity of polypeptides and polynucleotides; and protein gel electrophoresis, Western blots, immunoprecipitation, and enzyme-linked immunoassays to detect polypeptides. Other techniques such as in situ hybridization, enzyme staining, and immunostaining also can be used to detect the presence or expression of polypeptides and/or polynucleotides. Methods for performing all of the referenced techniques are known. As an alternative, a population of plants comprising independent transformation events can be screened for those plants having a desired trait, such as a modulated level of biomass. Selection and/or screening can be carried out over one or more generations, and/or in more than one geographic location. In some cases, transgenic plants can be grown and selected under conditions which induce a desired phenotype or are otherwise necessary to produce a desired phenotype in a transgenic plant. In addition, selection and/or screening can be applied during a particular developmental stage in which the phenotype is expected to be exhibited by the plant. Selection and/or screening can be carried out to choose those transgenic plants having a statistically significant difference in a biomass level relative to a control plant that lacks the transgene. Selected or screened transgenic plants have an altered phenotype as compared to a corresponding control plant, as described in the “Transgenic Plant Phenotypes” section herein.

### C. Plant Species

[0184] The polynucleotides and vectors described herein can be used to transform a number of monocotyledonous and dicotyledonous plants and plant cell systems, including species from one of the following families: Acanthaceae, Alliaceae, Alstroemeriaceae, Amaryllidaceae, Apocynaceae, Arecaceae, Asteraceae, Berberidaceae, Bixaceae, Brassicaceae, Bromeliaceae, Cannabaceae, Caryophyllaceae, Cephalotaxaceae, Chenopodiaceae, Colchicaceae, Cucurbitaceae, Dioscoreaceae, Ephedraceae, Erythroxylaceae, Euphorbiaceae, Fabaceae, Lamiaceae, Linaceae, Lycopodiaceae, Malvaceae, Melanthiaceae, Musaceae, Myrtaceae, Nyssaceae, Papaveraceae, Pinaceae, Plantaginaceae, Poaceae, Rosaceae, Rubiaceae, Salicaceae, Sapindaceae, Solanaceae, Taxaceae, Theaceae, or Vitaceae.

[0185] Suitable species may include members of the genus Abelmoschus, Abies, Acer, Agrostis, Allium, Alstroemeria, Ananas, Andrographis, Andropogon, Artemisia, Arundo, Atropa, Berberis, Beta, Bixa, Brassica, Calendula, Camellia, Camptotheca, Cannabis, Capsicum, Carthamus, Catharanthus, Cephalotaxus, Chrysanthemum, Cinchona, Citrullus, Coffea, Colchicum, Coleus, Cucumis, Cucurbita, Cynodon, Datura, Dianthus, Digitalis, Dioscorea, Elaeis, Ephedra, Erianthus, Erythroxylum, Eucalyptus, Festuca, Fragaria, Galanthus, Glycine, Gossypium, Helianthus, Hevea, Hordeum, Hyoscyamus, Jatropha, Lactuca, Linum, Lolium, Lupinus, Lycopersicon, Lycopodium, Manihot, Medicago, Mentha, Miscanthus, Musa, Nicotiana, Oryza, Panicum, Papaver, Parthenium, Pennisetum, Petunia, Phalaris, Phleum, Pinus, Poa, Poinsettia, Populus, Rauwolfia, Ricinus, Rosa, Saccharum, Salix, Sanguinaria, Scopolia, Secale, Solanum, Sorghum, Spartina, Spinacea, Tanacetum, Taxus, Theobroma, Triticosecale, Triticum, Uniola, Veratrum, Vinca, Vitis, and Zea.

[0186] Suitable species include Panicum spp., Sorghum spp., Miscanthus spp., Saccharum spp., Erianthus spp., Populus spp., Andropogon gerardii (big bluestem), Pennisetum purpureum (elephant grass), Phalaris arundinacea (reed canarygrass), Cynodon dactylon (bermudagrass), Festuca arundinacea (tall fescue), Spartina pectinata (prairie cord-grass), Medicago sativa (alfalfa), Arundo donax (giant reed), Secale cereale (rye), Salix spp. (willow), Eucalyptus spp. (eucalyptus), Triticosecale (triticum—wheat X rye) and bamboo.

[0187] Suitable species also include Helianthus annuus (sunflower), Carthamus tinctorius (safflower), Jatropha curcas (jatropha), Ricinus communis (castor), Elaeis guineensis (palm), Linum usitatissimum (flax), and Brassica juncea.

[0188] Suitable species also include Beta vulgaris (sugarbeet), and Manihot esculenta (cassava)

[0189] Suitable species also include Lycopersicon esculentum (tomato), Lactuca sativa (lettuce), Musa paradisiaca (banana), Solanum tuberosum (potato), Brassica oleracea (broccoli, cauliflower, Brussels sprouts), Camellia sinensis (tea), Fragaria ananassa (strawberry), Theobroma cacao (cocoa), Coffea arabica (coffee), Vitis vinifera (grape), Ananas comosus (pineapple), Capsicum annum (hot & sweet pepper), Allium cepa (onion), Cucumis melo (melon), Cucumis sativus (cucumber), Cucurbita maxima (squash), Cucurbita moschata (squash), Spinacea oleracea (spinach), Citrullus lanatus (watermelon), Abelmoschus esculentus (okra), and Solanum melongena (eggplant).

[0190] Suitable species also include Papaver somniferum (opium poppy), Papaver orientale, Taxus baccata, Taxus brevifolia, Artemisia annua, Cannabis sativa, Camptotheca acuminate, Catharanthus roseus, Vinca rosea, Cinchona officinalis, Colchicum autumnale, Veratrum californica, Digitalis lanata, Digitalis purpurea, Dioscorea spp., Andrographis paniculata, Atropa belladonna, Datura stomonium, Berberis spp., Cephalotaxus spp., Ephedra sinica, Ephedra spp., Erythroxylum coca, Galanthus wornorii, Scopolia spp., Lycopodium serratum (Huperzia serrata), Lycopodium spp., Rauwolfia serpentina, Rauwolfia spp., Sanguinaria canadensis, Hyoscyamus spp., Calendula officinalis, Chrysanthemum parthenium, Coleus forskohlii, and Tanacetum parthenium.

[0191] Suitable species also include Parthenium argentatum (guayule), Hevea spp. (rubber), Mentha spicata (mint), Mentha piperita (mint), Bixa orellana, and Alstroemeria spp.

[0192] Suitable species also include Rosa spp. (rose), Dianthus caryophyllus (carnation), Petunia spp. (petunia) and Poinsettia pulcherrima (poinsettia).

[0193] Suitable species also include Nicotiana tabacum (tobacco), Lupinus albus (lupin), Uniola paniculata (oats), bentgrass (Agrostis spp.), Populus tremuloides (aspen), Pinus spp. (pine), Abies spp. (fir), Acer spp. (maple), Hordeum vulgare (barley), Poa pratensis (bluegrass), Lolium spp. (ryegrass) and Phleum pratense (timothy).

[0194] In some embodiments, a suitable species can be a wild, weedy, or cultivated Pennisetum species such as, but not limited to, Pennisetum alopecuroides, Pennisetum arnhemicum, Pennisetum caffrum, Pennisetum clandestinum, Pennisetum divisum, Pennisetum glaucum, Pennisetum latifolium, Pennisetum macrostachyum, Pennisetum macrourum, Pennisetum orientale, Pennisetum pedicellatum, Pennisetum polystachion, Pennisetum polystachion ssp. Setosum, Pennisetum purpureum, Pennisetum setaceum, Pennisetum subangustum, Pennisetum typhoides, Pennisetum villosum, or hybrids thereof (e.g., Pennisetum purpureum×Pennisetum typhoidum).

[0195] In some embodiments, a suitable species can be a wild, weedy, or cultivated Miscanthus species and/or variety such as, but not limited to, Miscanthus×giganteus, Miscanthus sinensis, Miscanthus×ogiformis, Miscanthus floridulus, Miscanthus transmorrisonensis, Miscanthus oligostachyus, Miscanthus nepalensis, Miscanthus sacchariflorus, Miscanthus×giganteus ‘Amuri’, Miscanthus×giganteus ‘Nagara’, Miscanthus×giganteus ‘Illinois’, Miscanthus sinensis var. ‘Goliath’, Miscanthus sinensis var. ‘Roland’, Miscanthus sinensis var. ‘Africa’, Miscanthus sinensis var. ‘Fern Osten’, Miscanthus sinensis var. gracillimus, Miscanthus sinensis var. variegates, Miscanthus sinensis var. purpurascens, Miscanthus sinensis var. ‘Malepartus’, Miscanthus sacchariflorus var. ‘Robusta’, Miscanthus sinensis var. ‘Silberfedher’ (aka. Silver Feather), Miscanthus transmorrisonensis, Miscanthus condensatus, Miscanthus yakushimanum, Miscanthus var. ‘Alexander’, Miscanthus var. ‘Adagio’, Miscanthus var. ‘Autumn Light’, Miscanthus var. ‘Cabaret’, Miscanthus var. ‘Condensatus’, Miscanthus var. ‘Cosmopolitan’, Miscanthus var. ‘Dixieland’, Miscanthus var. ‘Gilded Tower’ (U.S. Plant Pat. No. 14,743), Miscanthus var. ‘Gold Bar’ (U.S. Plant Pat. No. 15,193), Miscanthus var. ‘Gracillimus’, Miscanthus var. ‘Graziella’, Miscanthus var. ‘Grosse Fontaine’, Miscanthus var. ‘Hinjo aka Little Nicky’™, Miscanthus var. ‘Juli’, Miscanthus var. ‘Kaskade’, Miscanthus var. ‘Kirk Alexander’, Miscanthus var. ‘Kleine Fontaine’, Miscanthus var. ‘Kleine Silberspinne’ (aka. ‘Little Silver Spider’), Miscanthus var. ‘Little Kitten’, Miscanthus var. ‘Little Zebra’ (U.S. Plant Pat. No. 13,008), Miscanthus var. ‘Lottum’, Miscanthus var. ‘Malepartus’, Miscanthus var. ‘Morning Light’, Miscanthus var. ‘Mysterious Maiden’ (U.S. Plant Pat. No. 16,176), Miscanthus var. ‘Nippon’, Miscanthus var. ‘November Sunset’, Miscanthus var. ‘Parachute’, Miscanthus var. ‘Positano’, Miscanthus var. ‘Puenktchen’ (aka ‘Little Dot’), Miscanthus var. ‘Rigoletto’, Miscanthus var. ‘Sarabande’, Miscanthus var. ‘Silberpfeil’ (aka.Silver Arrow), Miscanthus var. ‘Silverstripe’, Miscanthus var. ‘Super Stripe’ (U.S. Plant Pat. No. 18,161), Miscanthus var. ‘Strictus’, or Miscanthus var. ‘Zebrinus’.

[0196] In some embodiments, a suitable species can be a wild, weedy, or cultivated sorghum species and/or variety such as, but not limited to, Sorghum almum, Sorghum amplum, Sorghum angustum, Sorghum arundinaceum, Sorghum bicolor (such as bicolor, guinea, caudatum, kafir, and durra), Sorghum brachypodum, Sorghum bulbosum, Sorghum burmahicum, Sorghum controversum, Sorghum drummondii, Sorghum ecarinatum, Sorghum exstans, Sorghum grande, Sorghum halepense, Sorghum interjectum, Sorghum intrans, Sorghum laxiflorum, Sorghum leiocladum, Sorghum macrospermum, Sorghum matarankense, Sorghum miliaceum, Sorghum nigrum, Sorghum nitidum, Sorghum plumosum, Sorghum propinquum, Sorghum purpureosericeum, Sorghum stipoideum, Sorghum sudanensese, Sorghum timorense, Sorghum trichocladum, Sorghum versicolor, Sorghum virgatum, Sorghum vulgare, or hybrids such as Sorghum×almum, Sorghum×sudangrass or Sorghum×drummondii.

[0197] Thus, the methods and compositions can be used over a broad range of plant species, including species from the dicot genera Brassica, Carthamus, Glycine, Gossypium, Helianthus, Jatropha, Parthenium, Populus, and Ricinus; and the monocot genera Elaeis, Festuca, Hordeum, Lolium, Oryza, Panicum, Pennisetum, Phleum, Poa, Saccharum, Secale, Sorghum, Triticosecale, Triticum, and Zea. In some embodiments, a plant is a member of the species Panicum virgatum (switchgrass), Sorghum bicolor (sorghum, sudangrass), Miscanthus giganteus (miscanthus), Saccharum sp. (energycane), Populus balsamifera (poplar), Zea mays (corn), Glycine max (soybean), Brassica napus (canola), Triticum aestivum (wheat), Gossypium hirsutum (cotton), Oryza sativa (rice), Helianthus annuus (sunflower), Medicago sativa (alfalfa), Beta vulgaris (sugarbect), or Pennisetum glaucum (pearl millet).

[0198] In certain embodiments, the polynucleotides and vectors described herein can be used to transform a number of monocotyledonous and dicotyledonous plants and plant cell systems, wherein such plants are hybrids of different species or varieties of a specific species (e.g., Saccharum sp.×Miscanthus sp., Sorghum sp.×Miscanthus sp., e.g., Panicum virgatum×Panicum amarum Panicum virgatum×Panicum amarulum, and Pennisetum purpureum×Pennisetum typhoidum).

### D. Transgenic Plant Phenotypes

[0199] In some embodiments, a plant in which expression of a biomass-modulating polypeptide is modulated can have increased levels of biomass in plants. For example, a biomass-modulating polypeptide described herein can be expressed in a transgenic plant, resulting in increased levels of vegetative tissue. The biomass level can be increased by at least 2 percent, e.g., 2, 3, 4, 5, 6, 7, 8, 9, 10, 11, 12, 13, 14, 15, 16, 17, 18, 19, 20, 25, 30, 35, 40, 45, 50, 55, 60, or more than 60 percent, as compared to the biomass level in a corresponding control plant that does not express the transgene. In some embodiments, a plant in which expression of a biomass-modulating polypeptide is modulated can have decreased levels of seed production. The level can be decreased by at least 2 percent, e.g., 2, 3, 4, 5, 10, 15, 20, 25, 30, 35, or more than 35 percent, as compared to the seed production level in a corresponding control plant that does not express the transgene.

[0200] Increases in seed production in such plants can provide improved nutritional availability in geographic locales where intake of plant foods is often insufficient, or for biofuel production. In some embodiments, decreases in biomass in such plants can be useful in situations where vegetative tissues are not the primary plant part that is harvested for human or animal consumption (i.e., seeds are harvested).

[0201] In some embodiments, a plant in which expression of a biomass-modulating polypeptide is modulated can have increased or decreased levels of biomass in one or more plant tissues, e.g., vegetative tissues, reproductive tissues, or root tissues. For example, the biomass level can be increased by at least 2 percent, e.g., 2, 3, 4, 5, 6, 7, 8, 9, 10, 11, 12, 13, 14, 15, 16, 17, 18, 19, 20, 25, 30, 35, 40, 45, 50, 55, 60, or more than 60 percent, as compared to the biomass level in a corresponding control plant that does not express the transgene. In some embodiments, a plant in which expression of a biomass-modulating polypeptide is modulated can have decreased levels of biomass in one or more plant tissues. The biomass level can be decreased by at least 2 percent, e.g., 2, 3, 4, 5, 10, 15, 20, 25, 30, 35, or more than 35 percent, as compared to the biomass level in a corresponding control plant that does not express the transgene.

[0202] Increases in biomass in such plants can provide improved food quantity, or improved energy production. Decreases in biomass can provide more efficient partitioning of nutrients to plant part(s) that are harvested for human or animal consumption.

[0203] Typically, a difference in the amount of biomass in a transgenic plant or cell relative to a control plant or cell is considered statistically significant at p≤0.05 with an appropriate parametric or non-parametric statistic, e.g., Chi-square test, Student's t-test, Mann-Whitney test, or F-test. In some embodiments, a difference in the amount of biomass is statistically significant at p<0.01, p<0.005, or p<0.001. A statistically significant difference in, for example, the amount of biomass in a transgenic plant compared to the amount of a control plant indicates that the recombinant nucleic acid present in the transgenic plant results in altered biomass levels.

[0204] The phenotype of a transgenic plant is evaluated relative to a control plant. A plant is said “not to express” a polypeptide when the plant exhibits less than 10%, e.g., less than 9%, 8%, 7%, 6%, 5%, 4%, 3%, 2%, 1%, 0.5%, 0.1%, 0.01%, or 0.001%, of the amount of polypeptide or mRNA encoding the polypeptide exhibited by the plant of interest. Expression can be evaluated using methods including, for example, RT-PCR, Northern blots, S1 RNase protection, primer extensions, Western blots, protein gel electrophoresis, immunoprecipitation, enzyme-linked immunoassays, chip assays, and mass spectrometry. It should be noted that if a polypeptide is expressed under the control of a tissue-preferential or broadly expressing promoter, expression can be evaluated in the entire plant or in a selected tissue. Similarly, if a polypeptide is expressed at a particular time, e.g., at a particular time in development or upon induction, expression can be evaluated selectively at a desired time period.

[0205] Biomass can include harvestable plant tissues such as leaves, stems, and reproductive structures, or all plant tissues such as leaves, stems, roots, and reproductive structures. In some embodiments, biomass encompasses only above ground plant parts. In some embodiments, biomass encompasses only stem plant parts. In some embodiments, biomass encompasses only above ground plant parts except inflorescence and seed parts of a plant. Biomass can be measured as described in the examples section. Biomass can be quantified as dry matter yield, which is the mass of biomass produced (usually reported in T/acre) if the contribution of water is subtracted from the fresh mater weight. Dry matter yield (DMY) yield is calculated using the fresh matter weight (FMW) and a measurement of weight percent moisture (M) in the following equation. DMY=((100−M)/100)*FMW. Biomass can be quantified as fresh matter yield, which is the mass of biomass produced (usually reported in T/acre) on an as-received basis, which includes the weight of moisture.

### V. MODIFYING ENDOGENOUS NUCLEIC ACIDS ENCODING BIOMASS-MODULATING POLYPEPTIDES

[0206] This document also features plant cells and plants in which an endogenous biomass-modulating nucleic acid described herein has been modified (e.g., a regulatory region, intron, or coding region of the biomass-modulating nucleic acid has been modified). The biomass of such plants is altered relative to the corresponding level of a control plant in which the endogenous nucleic acid is not modified. Such plants are referred to herein as modified plants and may be used to produce, for example, increased amounts of biomass.

[0207] Endogenous nucleic acid can be modified by homologous recombination techniques. For example, sequence specific endonucleases (e.g., zinc finger nucleases (ZFNs)) and meganucleases can be used to stimulate homologous recombination at endogenous plant genes. See, e.g., Townsend et al., Nature 459:442-445 (2009); Tovkach et al., Plant J., 57:747-757 (2009); and Lloyd et al., Proc. Natl. Acad. Sci. USA, 102:2232-2237 (2005). In particular, ZFNs engineered to create DNA double strand breaks at specific loci can be used to make targeted sequence changes in endogenous plant genes. For example, an endogenous plant gene can be replaced with a variant containing one or more mutations (e.g., produced using site-directed mutagenesis or directed evolution).

[0208] In some embodiments, endogenous nucleic acids can be modified by methylation or demethylation such that the expression of the modified endogenous nucleic acid is altered. For example, a double stranded RNA can be used to activate gene expression by targeting noncoding regulatory regions in gene promoters. See Shibuya et al., Proc Natl Acad Sci USA, 106(5): 1660-1665 (2009); and Li et al., Proc Natl Acad Sci USA, 103(46):17337-42 (2006).

[0209] In some embodiments, endogenous nucleic acids can be modified using activation tagging. For example, a vector containing multiple copies of an enhancer element from the constitutively active promoter of the cauliflower mosaic virus (CaMV) 35S gene can be used to activate an endogenous gene. Sec, Weigel et al., Plant Physiology, 122:1003-1013 (2000).

[0210] In some embodiments, endogenous nucleic acids can be modified by introducing an engineered transcription activation/repression factor (e.g., zinc finger protein transcription factor, or ZFP TF. Sec, for example, the world wide web at sangamo.com/tech/tech_plat_over.html#whatarezfp). An engineered transcription activation/repression factor (such as ZFP TF) can activate, repress, or switch the target endogenous biomass gene expression by binding specifically to the promoter region or coding region of the endogenous genc.

[0211] In some embodiments, endogenous nucleic acids can be modified by mutagenesis. Genetic mutations can be introduced within regenerable plant tissue using one or more mutagenic agents. Suitable mutagenic agents include, for example, ethyl methane sulfonate (EMS), N-nitroso-N-cthylurea (ENU), methyl N-nitrosoguanidine (MNNG), ethidium bromide, diepoxybutane, ionizing radiation, x-rays, UV rays and other mutagens known in the art. Suitable types of mutations include, for example, insertions or deletions of nucleotides, and transitions or transversions in the endogenous nucleic acid sequence. In one embodiment, TILLING (Targeted Induced Local Lesions In Genomes) can be used to produce plants having a modified endogenous nucleic acid. TILLING combines high-density mutagenesis with high-throughput screening methods. See, for example, McCallum et al., Nat Biotechnol 18: 455-457 (2000); reviewed by Stemple, Nat Rev Genet 5(2):145-50 (2004).

[0212] In some embodiments, an endogenous nucleic acid can be modified via a gene silencing technique. See, for example, the section herein regarding “Inhibition of Expression of a Biomass-Modulating Polypeptide.”

[0213] A population of plants can be screened and/or selected for those members of the population that have a modified nucleic acid. A population of plants also can be screened and/or selected for those members of the population that have a trait or phenotype conferred by expression of the modified nucleic acid. As an alternative, a population of plants can be screened for those plants having a desired trait, such as a modulated level of biomass. For example, a population of progeny can be screened for those plants having a desired level of expression of a biomass-modulating polypeptide or nucleic acid. Physical and biochemical methods can be used to identify modified nucleic acids and/or expression levels as described with transgenic plants. Selection and/or screening can be carried out over one or more generations, and/or in more than one geographic location. In some cases, plants can be grown and selected under conditions which induce a desired phenotype or are otherwise necessary to produce a desired phenotype in a modified plant. In addition, selection and/or screening can be applied during a particular developmental stage in which the phenotype is expected to be exhibited by the plant. Selection and/or screening can be carried out to choose those modified plants having a statistically significant difference in a biomass level relative to a control plant in which the nucleic acid has not been modified. Selected or screened modified plants have an altered phenotype as compared to a corresponding control plant, as described in the “Transgenic Plant Phenotypes” section herein.

[0214] Although a plant or plant cell in which an endogenous biomass-modulating nucleic acid has been modified is not transgenic for that particular nucleic acid, it will be appreciated that such a plant or cell may contain transgenes. For example, a modified plant can contain a transgene for other traits, such as herbicide tolerance or insect resistance. As another example, a modifed plant can contain one or more transgenes that, in conjuction with modifications of one or more endogenous nucleic acids, exhibits an increase in biomass.

[0215] As with transgenic plant cells, modified plant cells can constitute part or all of a whole plant. Such plants can be grown in the same manner as described for transgenic plants and can be bred or propagated in the same manner as described for transgenic plants.

### VI. PLANT BREEDING

[0216] Genetic polymorphisms that are useful in such methods include simple sequence repeats (SSRs, or microsatellites), rapid amplification of polymorphic DNA (RAPDs), single nucleotide polymorphisms (SNPs), amplified fragment length polymorphisms (AFLPs) and restriction fragment length polymorphisms (RFLPs). SSR polymorphisms can be identified, for example, by making sequence specific probes and amplifying template DNA from individuals in the population of interest by PCR. For example, PCR techniques can be used to enzymatically amplify a genetic marker associated with a nucleotide sequence conferring a specific trait (e.g., nucleotide sequences described herein). PCR can be used to amplify specific sequences from DNA as well as RNA, including sequences from total genomic DNA or total cellular RNA. When using RNA as a source of template, reverse transcriptase can be used to synthesize complementary DNA (cDNA) strands. Various PCR methods are described, for example, in PCR Primer: A Laboratory Manual, Dieffenbach and Dveksler, cds., Cold Spring Harbor Laboratory Press, 1995.

[0217] Generally, sequence information from polynucleotides flanking the region of interest or beyond is employed to design oligonucleotide primers that are identical or similar in sequence to opposite strands of the template to be amplified. Primers are typically 14 to 40 nucleotides in length, but can range from 10 nucleotides to hundreds of nucleotides in length. Template and amplified DNA is repeatedly denatured at a high temperature to separate the double strand, then cooled to allow annealing of primers and the extension of nucleotide sequences through the microsatellite, resulting in sufficient DNA for detection of PCR products. If the probes flank an SSR in the population, PCR products of different sizes will be produced. Sec, e.g., U.S. Pat. No. 5,766,847.

[0218] PCR products can be qualitative or quantitatively analyzed using several techniques. For example, PCR products can be stained with a fluorescent molecule (e.g., PicoGreen® or OliGreen®) and detected in solution using spectrophotometry or capillary electrophoresis. In some cases, PCR products can be separated in a gel matrix (e.g., agarose or polyacrylamide) by electrophoresis, and size-fractionated bands comprising PCR products can be visualized using nucleic acid stains. Suitable stains can fluoresce under UV light (e.g., Ethidium bromide, GR Safe, SYBR® Green, or SYBR® Gold). The results can be visualized via transillumination or epi-illumination, and an image of the fluorescent pattern can be acquired using a camera or scanner, for example. The image can be processed and analyzed using specialized software (e.g., ImageJ) to measure and compare the intensity of a band of interest against a standard loaded on the same gel.

[0219] Alternatively, SSR polymorphisms can be identified by using PCR product(s) as a probe against Southern blots from different individuals in the population. Sec, U. H. Refseth et al., (1997) Electrophoresis 18: 1519. Briefly, PCR products are separated by length through gel electrophoresis and transferred to a membrane. SSR-specific DNA probes, such as oligonucleotides labeled with radioactive, fluorescent, or chromogenic molecules, are applied to the membrane and hybridize to bound PCR products with a complementary nucleotide sequence. The pattern of hybridization can be visualized by autoradiography or by development of color on the membrane, for example.

[0220] In some cases, PCR products can be quantified using a real-time thermocycler detection system. For example, Quantitative real-time PCR can use a fluorescent dye that forms a DNA-dye-complex (e.g., SYBR® Green), or a fluorophore-containing DNA probe, such as single-stranded oligonucleotides covalently bound to a fluorescent reporter or fluorophore (e.g. 6-carboxyfluorescein or tetrachlorofluorescin) and quencher (e.g., tetramethylrhodamine or dihydrocyclopyrroloindole tripeptide minor groove binder). The fluorescent signal allows detection of the amplified product in real time, thereby indicating the presence of a sequence of interest, and allowing quantification of the copy number of a sequence of interest in cellular DNA or expression level of a sequence of interest from cellular mRNA.

[0221] The identification of RFLPs is discussed, for example, in Alonso-Blanco et al. (Methods in Molecular Biology, vol.82, “Arabidopsis Protocols”, pp. 137-146, J. M. Martinez-Zapater and J. Salinas, eds., c. 1998 by Humana Press, Totowa, NJ); Burr (“Mapping Genes with Recombinant Inbreds”, pp. 249-254, in Freeling, M. and V. Walbot (Ed.), The Maize Handbook, c. 1994 by Springer-Verlag New York, Inc.: New York, NY, USA; Berlin Germany; Burr et al. Genetics (1998) 118: 519; and Gardiner, J. et al., (1993) Genetics 134: 917). For example, to produce a RFLP library enriched with single-or low-copy expressed sequences, total DNA can be digested with a methylation-sensitive enzyme (e.g., PstI). The digested DNA can be separated by size on a preparative gel. Polynucleotide fragments (500 to 2000 bp) can be excised, eluted and cloned into a plasmid vector (e.g., pUC18). Southern blots of plasmid digests can be probed with total sheared DNA to select clones that hybridize to single-and low-copy sequences. Additional restriction endonucleases can be tested to increase the number of polymorphisms detected.

[0222] The identification of AFLPs is discussed, for example, in EP 0 534 858 and US Pat. No. 5,878,215. In general, total cellular DNA is digested with one or more restriction enzymes. Restriction halfsite-specific adapters are ligated to all restriction fragments and the fragments are selectively amplified with two PCR primers that have corresponding adaptor and restriction site specific sequences. The PCR products can be visualized after size-fractionation, as described above.

[0223] In some embodiments, the methods are directed to breeding a plant line. Such methods use genetic polymorphisms identified as described above in a marker assisted breeding program to facilitate the development of lines that have a desired alteration in the biomass trait. Once a suitable genetic polymorphism is identified as being associated with variation for the trait, one or more individual plants are identified that possess the polymorphic allele correlated with the desired variation. Those plants are then used in a breeding program to combine the polymorphic allele with a plurality of other alleles at other loci that are correlated with the desired variation. Techniques suitable for use in a plant breeding program are known in the art and include, without limitation, backcrossing, mass selection, pedigree breeding, bulk selection, crossing to another population and recurrent selection. These techniques can be used alone or in combination with one or more other techniques in a breeding program. Thus, each identified plants is selfed or crossed a different plant to produce seed which is then germinated to form progeny plants. At least one such progeny plant is then selfed or crossed with a different plant to form a subsequent progeny generation. The breeding program can repeat the steps of selfing or outcrossing for an additional 0 to 5 generations as appropriate in order to achieve the desired uniformity and stability in the resulting plant line, which retains the polymorphic allele. In most breeding programs, analysis for the particular polymorphic allele will be carried out in each generation, although analysis can be carried out in alternate generations if desired.

[0224] In some cases, selection for other useful traits is also carried out, e.g., selection for fungal resistance or bacterial resistance. Selection for such other traits can be carried out before, during or after identification of individual plants that possess the desired polymorphic allele.

### VII. ARTICLES OF MANUFACTURE

[0225] Transgenic plants provided herein have various uses in the agricultural and energy production industries. For example, transgenic plants described herein can be used to make animal feed and food products. Such plants, however, are often particularly useful as a feedstock for energy production.

[0226] Transgenic plants described herein often produce higher yields of grain and/or biomass per hectare, relative to control plants that lack the exogenous nucleic acid. In some embodiments, such transgenic plants provide equivalent or even increased yields of grain and/or biomass per hectare relative to control plants when grown under conditions of reduced inputs such as fertilizer and/or water. Thus, such transgenic plants can be used to provide yield stability at a lower input cost and/or under environmentally stressful conditions such as drought. In some embodiments, plants described herein have a composition that permits more efficient processing into free sugars, and subsequently ethanol, for energy production. In some embodiments, such plants provide higher yields of ethanol, butanol, dimethyl ether, other biofuel molecules, and/or sugar-derived co-products per kilogram of plant material, relative to control plants. Such processing efficiencies are believed to be derived from the composition of the plant material, including, but not limited to, content of glucan, cellulose, hemicellulose, and lignin. By providing higher biomass yields at an equivalent or even decreased cost of production, the transgenic plants described herein improve profitability for farmers and processors as well as decrease costs to consumers.

[0227] Seeds from transgenic plants described herein can be conditioned and bagged in packaging material by means known in the art to form an article of manufacture. Packaging material such as paper and cloth are well known in the art. A package of seed can have a label, e.g., a tag or label secured to the packaging material, a label printed on the packaging material, or a label inserted within the package, that describes the nature of the seeds therein.

[0228] The invention will be further described in the following examples, which do not limit the scope of the invention described in the claims.

### VIII. EXAMPLES

### Example 1—Transgenic Rice Plants

[0229] The following symbols are used in with respect to rice transformation: T₀: plant regenerated from transformed tissue culture; T₁: first generation progeny of self-pollinated T₀ plants; T₂: second generation progeny of self-pollinated T₁ plants; T₃: third generation progeny of self-pollinated T₂ plants.

[0230] The following is a list of nucleic acids that were isolated from Arabidopsis thaliana plants: CeresAnnot: 544549 (SEQ ID NO:262), CeresAnnot: 1355066 (SEQ ID NO:116), CeresClone: 1356785 (SEQ ID NO:252), CeresClone: 26006 (SEQ ID NO:594), CeresClone: 4831 (SEQ ID NO: 76), CeresAnnot: 847799 (SEQ ID NO:208), and CeresAnnot: 878355 (SEQ ID NO:425). The following nucleic acids were isolated from Zea mays plants: CeresClone: 1384304 (SEQ ID NO: 553). The following nucleic acids were isolated from Oryza sativa plants: antisense sequence (SEQ ID NO:678). CeresClone: 638126 (SEQ ID NO:322) was isolated from Glycine max plants.

[0231] Each isolated nucleic acid described above was cloned into a Ti plasmid vector containing a phosphinothricin acetyltransferase gene which confers Finale™ resistance to transformed plants. Constructs were made using the above mentioned nucleic acids that contained cach operably linked to a 326 promoter construct was introduced into callus cells of the rice cultivar Kitaake by an Agrobacterium-mediated transformation protocol. Approximately 20-30 independent T₀ transgenic plants were generated from each transformation, as well as for the control plasmid (empty vector). Preliminary phenotypic analysis indicated that T₀ transformants did not show any significant phenotypic anomalies in vegetative organs, with a few exceptions where some plants appeared small with reduced fertility, most likely due to tissue culture effects.

[0232] To plants were grown in a greenhouse, allowed to self-pollinate, and T₁ seeds collected. T₁ and T₂ plants were grown in a field. The presence of each construct was confirmed by PCR.

[0233] Rice seeds were soaked for 3-4 days before spring germination and transplanted to the field about one month later in Langfang, China. The distance between rows was 25 cm and the distance between plants was 15 cm. The combined fertilizer (16N-16P-16K) was applied at 25 kg/mu (666.7 m²) just before transplanting. 12.5 kg/mu of urea was applied at two times during the growing season prior to panicle development.

[0234] Ten plants were grown per transgenic event within one row. Only those rows that were visibly different from control plants were measured. Plant height was measured at maturity.

[0235] Biomass (Dry weight) measurements for CW00733, CW00710, CW00628, CW00604,CW00564, CW00469, and CW00536 were collected from T₁ plants that were grown. The stems with leaves and leaf sheaths but without panicles were dried in a greenhouse for at least a month, and then weighed for each plant (all tillers weighed together for each plant). Measurements for CW00191, CW00297, and CW00319 were collected from T₂ plants that were grown.

[0236] The stems with leaves and leaf sheaths but with panicles separated were dried in a room for at least a month, and then weighed for each plant (all tillers weighed together for each plant). Tiller number was counted after 4 months of growth.

### Example 2—Results for Rice Events CW00733, Ceres Clone:1384304, (SEQ ID NO: 553)

[0237] T₁ seed from one event of CW00733 containing CeresClone:1384304 was analyzed as described in Example 1. The plant height, biomass, and panicle weight of transgenic T₁ plants in comparison to plants not containing the transgene grown at the same location is shown in Table 1. Each table data row corresponds to a field row. The data points represent an average of 10 transgenic plants (1 row of same event) and an average of 40 control plants (4 rows). An increase in biomass, height and panicle weight was shown in comparison to plants not containing the transgene.

TABLE 1

| Plant Height (cm) | | Biomass (g)/plant | | Panicle wt (g)/plant | |
|---|---|---|---|---|---|
| Control | Transgenic | Control | Transgenic | Control | Transgenic |
| 72.41 | 80.30 | 16.70 | 27.45 | 21.56 | 28.89 |
| | | | | 24.58 | 23.42 |

[0238] The plant height (cm), yield (measured as g/per panicles of 16 plants), and biomass (measured as g of stem only (no inflorescence or root)) of transgenic T₂ CW00733 plants in comparison to plants not containing the transgene grown (WT) at the same location are shown in Table 2. Results from CW00604 events (Example 7) also are shown in Table 2. An increase in height and biomass was observed.

TABLE 2
T2 Plants from CW00733 and CW00604 events

| | Rep | WT | CW00604 | CW00733 |
|---|---|---|---|---|
| Height | Rep I | 80.3 | 81.3 | 85.0 |
| (cm) | Rep II | 73.3 | 79.7 | 84.5 |
| | Rep III | 77.2 | 79.1 | 82.9 |
| | Average | 76.9 | 80.0 | 84.1 |
| Yield | Rep I | 395.4 | 357.0 | 356.8 |
| | Rep II | 385.0 | 324.0 | 348.5 |
| | Rep III | 361.6 | 309.0 | 345.3 |
| | Average | 380.7 | 330.0 | 350.2 |
| Biomass | Rep I | 16.6 | 24.8 | 19.3 |
| | Rep II | 20.0 | 20.8 | 17.7 |
| | Rep III | 16.6 | 19.8 | 19.7 |
| | Average | 17.7 | 21.8 | 18.9 |

### Example 3—Results for Rice Events CW00319, Ceres Annot: 544549 (SEQ ID NO: 262)

[0239] Biomass from plants grown from T₂ and T₃ seed from one event of CW00319 containing Ceres Annot: 544549 was analyzed as described in Example 1. The average biomass of transgenic T₂ and T₃ plants in comparison to plants not containing the transgene grown at the same location is shown in Table 3. The low nitrogen plots and control plots were each replicated 3 times in randomized block design, having transgenic plants representing multiple events and controls. Each plot contained 40 plants. Ten plants were measured per plot for one event of CW00319. Each of the biomass values presented in Table 3 represents an average of 30 plants measured. The results show a measured increase in biomass for transgenic plants under low nitrogen conditions in comparison to plants not containing the transgene.

TABLE 3

| | |
|---|---|
| Biomass (g)/plant (normal) | Biomass (g)/plant (Low N) |

| Control | Transgenic | Control | Transgenic |
|---|---|---|---|
| 14.6 | 14.38 | 16.01 | 17.44 |

### Example 4—Results for Rice Events CW00710, Ceres Annot: 1355066 (SEQ ID NO: 116)

[0240] T₁ seed from one event of CW00710 containing Ceres Annot: 1355066 was analyzed as described in Example 1. The plant height, biomass, and panicle weight of transgenic T₁ plants in comparison to plants not containing the transgene grown at the same location is shown in Table 4. The table data row corresponds to a field row. The data points represent an average of 10 transgenic plants (1 row of same event) and an average of 40 control plants (4 rows). An increase in biomass and height was shown in comparison to plants not containing the transgene.

TABLE 4

| Plant Height (cm) | | Biomass (g)/plant | | Panicle wt (g)/plant | |
|---|---|---|---|---|---|
| Control | Transgenic | Control | Transgenic | Control | Transgenic |
| 72.20 | 85.60 | 14.51 | 24.15 | 19.38 | 18.70 |

### Example 5—Results for Rice Events CW00628 (SEQ ID NO: 678)

[0241] T₁ seed from one event of CW00628 containing SEQ ID NO: 678 RNAi construct was analyzed as described in Example 1. The plant height, biomass, and panicle weight of transgenic T₁ plants in comparison to plants not containing the transgene grown at the same location is shown in Table 5. The table data row corresponds to a field row. The data points represent an average of 10 transgenic plants (1 row of same event) and an average of 40 control plants (4 rows). An increase in biomass and height was shown in comparison to plants not containing the transgene.

TABLE 5

| Plant Height (cm) | | Biomass (g)/plant | | Panicle wt (g)/plant | |
|---|---|---|---|---|---|
| Control | Transgenic | Control | Transgenic | Control | Transgenic |
| 75.30 | 81.60 | 15.92 | 29.96 | 24.53 | 20.38 |

### Example 6—Results for Rice Events CW00297, Ceres Clone: 625057 (SEQ ID NO: 644)

[0242] Biomass from plants grown from T₂ and T₃ seed from one event of CW00297 containing Ceres Clone: 625057 was analyzed as described in Example 1. The average biomass of transgenic T₂ and T₃ plants in comparison to plants not containing the transgene grown at the same location is shown in Table 6. The low nitrogen plots and control plots were each replicated 3 times in randomized block design, having transgenic plants representing multiple events and controls. Each plot contained 40 plants. Ten plants were measured per plot for one event of CW00297. Each of the biomass values presented in Table 6 represents an average of 30 plants measured. The results show a measured increase in biomass for transgenic plants under normal and low nitrogen conditions in comparison to plants not containing the transgene.

TABLE 6

| | |
|---|---|
| Biomass (g)/plant (normal) | Biomass (g)/plant (Low N) |

| Control | Transgenic | Control | Transgenic |
|---|---|---|---|
| 14.6 | 15.93 | 16.01 | 17.35 |

### Example 7—Results for Rice Events CW00604, Ceres Clone: 1356785 (SEQ ID NO:252)

[0243] T₁ seed from one event of CW00604 containing Ceres Clone: 1356785 was analyzed as described in Example 1. The plant height, biomass, and panicle weight of transgenic T₁ plants in comparison to plants not containing the transgene grown at the same location is shown in Table 7. Each table data row corresponds to a field row. The data points represent an average of 10 transgenic plants (1 row of same event) and an average of 40 control plants (4 rows). An increase in biomass, height and panicle weight was shown in comparison to plants not containing the transgene. An increase in height and biomass also was observed for T₂ plants. See Table 2.

TABLE 7

| Plant Height (cm) | | Biomass (g)/plant | | Panicle wt (g)/plant | |
|---|---|---|---|---|---|
| Control | Transgenic | Control | Transgenic | Control | Transgenic |
| 72.53 | 81.25 | 16.40 | 28.68 | 22.21 | 29.91 |
| 73.70 | 82.30 | | | | |

### Example 8—Results for Rice Events CW00564, Ceres Clone: 638126 (SEQ ID NO: 322)

[0244] T₁ seed from one event of CW00564 containing Ceres Clone: 638126 was analyzed as described in Example 1. The plant height, biomass, and panicle weight of transgenic T₁ plants in comparison to plants not containing the transgene grown at the same location is shown in Table 8. The table data row corresponds to a field row. The data points represent an average of 10 transgenic plants (1 row of same event) and an average of 40 control plants (4 rows). An increase in biomass, height, and panicle weight was shown in comparison to plants not containing the transgene.

TABLE 8

| Plant Height (cm) | | Biomass (g)/plant | | Panicle wt (g)/plant | |
|---|---|---|---|---|---|
| Control | Transgenic | Control | Transgenic | Control | Transgenic |
| 72.88 | 85.44 | 18.11 | 36.47 | 22.56 | 37.47 |

[0245] The plant height (cm), yield (measured as g/per panicles of 16 plants), and biomass (measured as g of stem only (no inflorescence or root)) of transgenic T₂ CW00564 plants in comparison to plants not containing the transgene grown (WT) at the same location are shown in Table 9. Results from CW00469 events (Example 10) also are shown in Table 9. An increase in height, yield, and biomass was observed.

TABLE 9
T2 Plants from CW00564 and CW00469 events

| | Rep | WT | CW00469 | CW00564 |
|---|---|---|---|---|
| Height | Rep I | 77.3 | 117.1 | 90.7 |
| (cm) | Rep II | 76.9 | 117.7 | 91.5 |
| | Rep III | 77.4 | 113.1 | 92.7 |
| | Average | 77.2 | 115.9 | 91.6 |
| Yield | Rep I | 356.9 | 426.0 | 406.8 |
| | Rep II | 343.2 | 378.8 | 423.6 |
| | Rep III | 366.7 | 398.0 | — |
| | Average | 355.6 | 400.9 | 415.2 |
| Biomass | Rep I | 17.1 | 29.7 | 25.2 |
| | Rep II | 15.1 | 26.5 | 25.1 |
| | Rep III | 14.6 | 27.1 | 24.4 |
| | Average | 15.6 | 27.7 | 24.9 |

### Example 9—Results for Rice Events CW00010, Ceres Clone: 26006 (SEQ ID NO: 594)

[0246] T₁ seed from three events of CW00010 containing Ceres Clone: 26006 was analyzed as described in Example 1. The plant height, biomass, tiller number, flowering time, and panicle weight of transgenic T₁ plants in comparison to plants not containing the transgene grown at the same location is shown in Tables 10, 11, and 12. The data points represent an average of 10 transgenic plants (1 row of same event) and an average of 40 control plants (4 rows). An increase in biomass, height, tiller number, and panicle weight was shown in comparison to plants not containing the transgene.

TABLE 10
Event 1

| | | | Number of |
|---|---|---|---|
| | Percent | | plants |
| | Increase | p value | measured |
| Biomass | 9 | 0.307 | 11 |
| Plant Height | 7 | 0.028 | 11 |
| Tiller Number | 27 | 0.002 | 10 |
| Flowering Time | 10 | 0.048 | 11 |
| Panicle weight | 16 | 0.012 | 39 |

TABLE 11
Event 17

| | | | Number of |
|---|---|---|---|
| | Percent | | plants |
| | Increase | P value | measured |
| Plant Height | 3 | 0.004 | 7 |
| Tiller Number | 34 | | 1 |
| Panicle weight | 4 | 0.591 | 7 |

TABLE 12
Event 2

| | | | Number of |
|---|---|---|---|
| | Percent | | plants |
| | Increase | p value | measured |
| Plant Height | 2 | 0.007 | 15 |
| Tiller Number | 27 | 0.013 | 10 |
| Panicle weight | 16 | 0.011 | 14 |

### Example 10—Results for Rice Events CW00469, Ceres Clone: 4831 (SEO ID NO: 76)

[0247] T₁ seed from one event of CW00469 containing Ceres Clone: 4831 was analyzed as described in Example 1. The plant height, biomass, and panicle weight of transgenic T₁ plants in comparison to plants not containing the transgene grown at the same location is shown in Table 13. The table data row corresponds to a field row. The data points represent an average of 10 transgenic plants (1 row of same event) and an average of 40 control plants (4 rows). An increase in biomass, height, and panicle weight was shown in comparison to plants not containing the transgene. An increase in height, yield, and biomass was shown in T₂ plants (see Table 9).

TABLE 13

| Plant Height (cm) | | Biomass (g)/plant | | Panicle wt (g)/plant | |
|---|---|---|---|---|---|
| Control | Transgenic | Control | Transgenic | Control | Transgenic |
| 76.54 | 112.22 | 25.44 | 56.06 | 32.63 | 62.70 |

### Example 11—Results for Rice Events CW00536, Ceres Annot: 847799 (SEO ID NO: 208)

[0248] T₁ seed from 16 events of CW00536 containing Ceres Annot: 847799 was analyzed as described in Example 1. The plant height and panicle weight of transgenic T₁ plants in comparison to plants not containing the transgene grown at the same location is shown in Tables 14 and 15. The data points represent an average of 16 events with 15 transgenic plants per event and an average of several hundred control plants. An increase in height and panicle weight was shown in comparison to plants not containing the transgene.

TABLE 14
Panicle wt (g)/plant

| Control | STDEV | Transgenic | STDEV |
|---|---|---|---|
| 17.916 | 2.181 | 20.854 | 3.419 |

TABLE 15
Plant Height (cm)

| Event | Percent Increase over control |
|---|---|
| CW00536-03 | 7.79 |
| CW00536-05 | 5.66 |
| CW00536-11 | 8.71 |
| CW00536-12 | 8.47 |
| CW00536-20 | 8.77 |

### Example 12—Results for Rice Events SR05004, CW00191, CeresAnnot: 878355 (SEQ ID NO: 425)

[0249] Biomass from plants grown from T₂ and T₃ seed from one event of CW00191 containing CeresAnnot: 878355 was analyzed as described in Example 1. The average biomass of transgenic T₂ and T₃ plants in comparison to plants not containing the transgene grown at the same location is shown in Table 16. The low nitrogen plots and control plots were each replicated 3 times in randomized block design, having transgenic plants representing multiple events and controls. Each plot contained 40 plants. Ten plants were measured per plot for one event of CW00191. Each of the biomass values presented in Table 16 represents an average of 30 plants measured. The results show a measured increase in biomass for transgenic plants under normal and low nitrogen conditions in comparison to plants not containing the transgene.

TABLE 16

| | |
|---|---|
| Biomass (g)/plant (normal) | Biomass (g)/plant (Low N) |

| Control | Transgenic | Control | Transgenic |
|---|---|---|---|
| 14.6 | 16.75 | 16.01 | 19.64 |

### Example 13—Determination of Functional Homologs by Reciprocal BLAST

[0250] A candidate sequence was considered a functional homolog of a reference sequence if the candidate and reference sequences encoded proteins having a similar function and/or activity. A process known as Reciprocal BLAST (Rivera et al., Proc. Natl. Acad. Sci. USA, 95:6239-6244 (1998)) was used to identify potential functional homolog sequences from databases consisting of all available public and proprietary peptide sequences, including NR from NCBI and peptide translations from Ceres clones.

[0251] Before starting a Reciprocal BLAST process, a specific reference polypeptide was searched against all peptides from its source species using BLAST in order to identify polypeptides having BLAST sequence identity of 80% or greater to the reference polypeptide and an alignment length of 85% or greater along the shorter sequence in the alignment. The reference polypeptide and any of the aforementioned identified polypeptides were designated as a cluster.

[0252] The BLASTP version 2.0 program from Washington University at Saint Louis, Missouri, USA was used to determine BLAST sequence identity and E-value. The BLASTP version 2.0 program includes the following parameters: 1) an E-value cutoff of 1.0e−5; 2) a word size of 5; and 3) the-postsw option. The BLAST sequence identity was calculated based on the alignment of the first BLAST HSP (High-scoring Segment Pairs) of the identified potential functional homolog sequence with a specific reference polypeptide. The number of identically matched residues in the BLAST HSP alignment was divided by the HSP length, and then multiplied by 100 to get the BLAST sequence identity. The HSP length typically included gaps in the alignment, but in some cases gaps were excluded.

[0253] The main Reciprocal BLAST process consists of two rounds of BLAST searches; forward search and reverse search. In the forward search step, a reference polypeptide sequence, “polypeptide A,” from source species SA was BLASTed against all protein sequences from a species of interest. Top hits were determined using an E-value cutoff of 10⁻⁵ and a sequence identity cutoff of 35%. Among the top hits, the sequence having the lowest E-value was designated as the best hit, and considered a potential functional homolog or ortholog. Any other top hit that had a sequence identity of 80% or greater to the best hit or to the original reference polypeptide was considered a potential functional homolog or ortholog as well. This process was repeated for all species of interest.

[0254] In the reverse search round, the top hits identified in the forward search from all species were BLASTed against all protein sequences from the source species SA. A top hit from the forward search that returned a polypeptide from the aforementioned cluster as its best hit was also considered as a potential functional homolog.

[0255] Functional homologs were identified by manual inspection of potential functional homolog sequences. Representative functional homologs for SEQ ID NO: 554, 263, 117, 1, 645, 253, 323, 595, 77, 209, and 426 are shown in FIGS. 1-11, respectively. Additional exemplary homologs are correlated to certain Figures in the Sequence Listing.

### Example 14—Determination of Functional Homologs by Hidden Markov Models

[0256] Hidden Markov Models (HMMs) were generated by the program HMMER 2.3.2. To generate each HMM, the default HMMER 2.3.2 program parameters, configured for global alignments, were used.

[0257] An HMM was generated using the sequences shown in FIG. 1 as input. These sequences were fitted to the model and a representative HMM bit score for each sequence is shown in the Sequence Listing. Additional sequences were fitted to the model, and representative HMM bit scores for any such additional sequences are shown in the Sequence Listing. The results indicate that these additional sequences are functional homologs of SEQ ID NO: 554.

[0258] The procedure above was repeated and an HMM was generated for each group of sequences shown in FIGS. 2-11, using the sequences shown in each Figure as input for that HMM. A representative bit score for each sequence is shown in the Sequence Listing. Additional sequences were fitted to certain HMMs, and representative HMM bit scores for such additional sequences are shown in the Sequence Listing. The results indicate that these additional sequences are functional homologs of the sequences used to generate that HMM.

### Other Embodiments

[0259] It is to be understood that while the invention has been described in conjunction with the detailed description thereof, the foregoing description is intended to illustrate and not limit the scope of the invention, which is defined by the scope of the appended claims. Other aspects, advantages, and modifications are within the scope of the following claims.

The application's sequence listing, which the Patent Office published only in electronic form, follows.

SEQUENCE LISTING (701 sequences)

SEQ ID NO: 1 - protein, 235 aa, Oryza sativa
  REGION 32..83: note = Pfam Name: AP2 Pfam Description: AP2 domain
  REGION 1..235: note = Bit score of 550.1 for HMM based on sequences of Figure 4
MAPRAATVEKVAVAPPTGLGLGVGGGVGAGGPHYRGVRKRPWGRYAAEIRDPAKKSRVWLGTYDTAEEAARAYDAAAREFRGAKAKTNFPFASQSMVGCGGSPSSNSTVDTGGGGVQTPMRAMPLPPTLDLDLFHRAAAVTAVAGTGVRFPFRGYPVARPATHPYFFYEQAAAAAAAEAGYRMMKLAPPVTVAAVAQSDSDSSSVVDLAPSPPAVTANKAAAFDLDLNRPPPVEN

SEQ ID NO: 2 - protein, 246 aa, Triticum aestivum
  REGION 32..83: note = Pfam Name: AP2 Pfam Description: AP2 domain
  REGION 1..246: note = Public GI ID no. 84795244
  REGION 1..246: note = Bit score of 566.8 for HMM based on sequences of Figure 4
  REGION 1..246: note = Functional Homolog Of SEQ ID NO. 1
MAPRAAEKAPVSPPTGLGLGLGGGVGVVAGGAHYRGVRKRPWGRYAAEIRDPAKKSRVWLGTYDTAEEAARAYDTAAREFRGAKAKTNFPFPSSSSSSPVAGAGGGGSPSSDSTLDSSGGGSGGCAQAPMQAIPLPPALDLDLFHRAAAVTAVAGGGMRFPFNGYPVAPRQPMHPYFFYEQAAAAAAAASGYRALKVAQPVTVAAVARSDSDSSSVVDLSPSPPAVTAHKAVAFDLDLNRPPPSED

SEQ ID NO: 3 - DNA, 1052 bp, Panicum virgatum
  misc_feature 1..1052: note = Ceres Clone ID no. 1725396
  misc_feature 1..1052: note = Encodes the peptide sequence at SEQ ID NO. 4
  source 1..1052: mol_type = unassigned DNA
agactccatacacccaccctctctacgcgcagctcctcgctgaaccggaacacccgcacacacacgccacttggacaccatggcgccccgggcggcggacaagtcgccggtgccgccggccaccggcctcggtctcggcgtcggcggtgccgtcggaggcctgggcatgggcccgcactacaggggcgtgcggaagcgcccgtgggggcggtacgccgcggagatccgcgacccggccaagaagagccgcgtgtggctgggaacgtacgacaccgccgaggaggccgcccgcgcctacgacgctgccgcgcgcgacttccgcggcgccaaggccaagaccaacttcccgttcgcgtcccagtgccccgtcgccgccggcgccggcgccggcagccccagcagcaactgcaccgtggaatcgcgcggaggcggcagcggctacggcgtccaggcgcccatgcaggccatgccgctgcccccggccctcgatctcgatctcttccaccgggcggcggccgtgaccgcggtctcccccggcggcatgcggtttcccttcaaagggtaccctgtcgcgcgcccgaccccgaacccctacttcttctacgaacaggcggcagcggccgcggccgcggcggccggctaccggatgctcaaggtcgccccgccgccggtcaccgtggccgccgtcgcgcagagcgactccgactcctcgtcggtggttgatcgcaccccttcgccgcccgcggttgccgcaaaaaaggaggtctccttcgatctggatctgaactggccgccgccggcggagaactagccacacccaccagagtttttagctgacgacttcgtagtttctctttcctttttgccttgaggaatattacttctgttatttttttttggtcctctagcctgtagttttgttcagtagcctgtgagagacggagaagcctgtgtacatagtttttccgccagaggacggaattgatctgttgctttcccaccccataaaccataaacgcaaaaaaaaaaacatcacatttgaatggttctag

SEQ ID NO: 4 - protein, 243 aa, Panicum virgatum
  REGION 32..83: note = Pfam Name: AP2 Pfam Description: AP2 domain
  REGION 1..243: note = Ceres Clone ID no. 1725396
  REGION 1..243: note = Bit score of 585.0 for HMM based on sequences of Figure 4
  REGION 1..243: note = Functional Homolog Of SEQ ID NO. 1
MAPRAADKSPVPPATGLGLGVGGAVGGLGMGPHYRGVRKRPWGRYAAEIRDPAKKSRVWLGTYDTAEEAARAYDAAARDFRGAKAKTNFPFASQCPVAAGAGAGSPSSNCTVESRGGGSGYGVQAPMQAMPLPPALDLDLFHRAAAVTAVSPGGMRFPFKGYPVARPTPNPYFFYEQAAAAAAAAAGYRMLKVAPPPVTVAAVAQSDSDSSSVVDRTPSPPAVAAKKEVSFDLDLNWPPPAEN

SEQ ID NO: 5 - DNA, 729 bp, Sorghum bicolor
  misc_feature 1..729: note = Ceres Annot ID no. 8669118
  misc_feature 1..729: note = Encodes the peptide sequence at SEQ ID NO. 6
  source 1..729: mol_type = unassigned DNA
atggcgccccgggtggcggacaagtcgccgttgccgccggccaccggcctcggactgggcgttggcggagtagtcggaggcgtgggcatgggcccacactacagaggcgtgagaaagcggccgtggggacgtttcgccgctgagatccgcgaccctgccaagaaaagccgcgtgtggctaggcacgtacgacacggccgaggaggccgccaaggcctacgacgccgccgcccgcgagttccgaggcgccaaggccaagacgaacttcccgttcccgtctcagtgcgccgtcgccgccggcggtgctggcagcccctgcagcaacagcaccgttgactcgagcggcggcgccagcggctgtgccgtccaggcgcctatgcaggccatgccgctgcctccggccctcgatctcgatctcttccatcgggcggccgccgtgaacgcggtcaccgcaggcggcatgcggtttccgttcaagggctaccccgtcgcgcgtccaaccccgcaccagtacttcttctacgaacaggccgccgcagccgctgccgcggcggccggctaccggatgcttaaggtggccccaccgccggtcaccgtggccgccgtcgcgcagagtgattcggactcctcgtctgtggttgatcacaccccttcgcctcccgcggtgacggcaaagaaggaggtgggcttcgagctggatctgaactggccgccgccggcagagaactag

SEQ ID NO: 6 - protein, 242 aa, Sorghum bicolor
  REGION 32..83: note = Pfam Name: AP2 Pfam Description: AP2 domain
  REGION 1..242: note = Ceres Annot ID no. 8669118
  REGION 1..242: note = Bit score of 594.1 for HMM based on sequences of Figure 4
  REGION 1..242: note = Functional Homolog Of SEQ ID NO. 1
MAPRVADKSPLPPATGLGLGVGGVVGGVGMGPHYRGVRKRPWGRFAAEIRDPAKKSRVWLGTYDTAEEAAKAYDAAAREFRGAKAKTNFPFPSQCAVAAGGAGSPCSNSTVDSSGGASGCAVQAPMQAMPLPPALDLDLFHRAAAVNAVTAGGMRFPFKGYPVARPTPHQYFFYEQAAAAAAAAAGYRMLKVAPPPVTVAAVAQSDSDSSSVVDHTPSPPAVTAKKEVGFELDLNWPPPAEN

SEQ ID NO: 7 - DNA, 994 bp, Zea mays
  misc_feature 1..994: note = Ceres Clone ID no. 280241
  misc_feature 1..994: note = Encodes the peptide sequence at SEQ ID NO. 8
  source 1..994: mol_type = unassigned DNA
aagacgcaatacacatacaccccctcttgcccacaccacctcgctgaaccggaagacccgcacacacacgccacttgtagaccatggcgccccgggtggcggacaagtcgcctctaccgccggccaccggcctggggctgggcgttggcggaggagtcggaggcgtgggcatgggcccgcactacagaggcgtgaggaagcgtccatggggacgctacgccgccgagatccgcgaccctgccaagaaaagccgcgtgtggctcggcacgtacgacacggccgaggaggccgccaaggcgtacgattccgccgcccgcgagttccgaggcgccaaggccaagacgaacttcccgttcccctcccagtgctccgtcgcctccgttgctgccggtagcgctagtagcaacagcaccgtggattcgagcggtggcggtagcggctgtggcatccaggcgcctatgcaggccatgccgcttcctccggctctcgatctcgacctcttccatcgggcggccgccgtgaacgcagtctccaccggcatgcggtttccgttcaagggctatcctgtcgcctgcccgacgccacagcagtactttttctacgagcaggcagcggccgcggctgccgcggcatccggataccggatgctcaaggtcgccccaccggccgtgactgtggccgcggtggcgcagagcgactccgactcgtcgtctgtggttgatcactccccttcgcctcccgcggtgacggaaaacaaggtgggcttcgaactggatctgaactggcccccgccggcagagaactaggcaggccgaagtttttggctgacgacttagtagcttctttttcccttttgccttcatcaggaatgttacttgtggttgtttggtcctgtatggctgtattcttgttctgtagactaagagatggggagtcttgtaaatattttttttccgtcgagacggaaatgaactgagatctgttcgtctgtccg

SEQ ID NO: 8 - protein, 240 aa, Zea mays
  REGION 32..83: note = Pfam Name: AP2 Pfam Description: AP2 domain
  REGION 1..240: note = Ceres Clone ID no. 280241
  REGION 1..240: note = Bit score of 586.0 for HMM based on sequences of Figure 4
  REGION 1..240: note = Functional Homolog Of SEQ ID NO. 1
MAPRVADKSPLPPATGLGLGVGGGVGGVGMGPHYRGVRKRPWGRYAAEIRDPAKKSRVWLGTYDTAEEAAKAYDSAAREFRGAKAKTNFPFPSQCSVASVAAGSASSNSTVDSSGGGSGCGIQAPMQAMPLPPALDLDLFHRAAAVNAVSTGMRFPFKGYPVACPTPQQYFFYEQAAAAAAAASGYRMLKVAPPAVTVAAVAQSDSDSSSVVDHSPSPPAVTENKVGFELDLNWPPPAEN

SEQ ID NO: 9 - DNA, 805 bp, Musa acuminata
  misc_feature 1..805: note = Ceres Clone ID no. 1712594
  misc_feature 1..805: note = Encodes the peptide sequence at SEQ ID NO. 10
  source 1..805: mol_type = unassigned DNA
atcgcggaaaccgaaacagagggagaggatcgaacagtcgaaagaaaggcgtgtgagcttggttccttttccatggctccaagggggaagctcagcaccgtcgccgacggtgaagggaaggagatgcgtttccgaggggtgaggaagcggccgtggggccggtacgccgccgagatacgcgaccccagcaagaagacccgagtctggctcggtaccttcgacaccgcagaggaggccgccagagcctacgacaacgccgcccgcgatttccgcggcgccaaggccaagaccaacttcgccttctcagacgcctgcagcagccccagcgccgtcccggctgccactggcagccccagtagccagagcagcaccgtggaatcctcaggccgcgaggtggctgcggcggcggtgcctccactcgctgttccgctcccaccctccctcgatctgggcctcctctaccgcggcggaaccggcggtcgcttcccctttcagtcatacccaaccgccgccccgtcggcccagcagttctttttcctggacgcaaagtcggccacgaataaccgccagctggccctttgcccgccgatgttcgtcgcctgcttccagccgccgcccgccgtggccgtgcagagcgactccgactcctcctccgtcgtagatctccacccggactatcgctctcctcctccgcaggcgaaggcgttccctctcgctttcgacctcaacctccctccgccggaggagatcgtgtgactcggaagccgtcagaccgtcccccaaactcttccactcctctgatatc

SEQ ID NO: 10 - protein, 227 aa, Musa acuminata
  REGION 18..69: note = Pfam Name: AP2 Pfam Description: AP2 domain
  REGION 1..227: note = Ceres Clone ID no. 1712594
  REGION 1..227: note = Bit score of 504.5 for HMM based on sequences of Figure 4
  REGION 1..227: note = Functional Homolog Of SEQ ID NO. 1
MAPRGKLSTVADGEGKEMRFRGVRKRPWGRYAAEIRDPSKKTRVWLGTFDTAEEAARAYDNAARDFRGAKAKTNFAFSDACSSPSAVPAATGSPSSQSSTVESSGREVAAAAVPPLAVPLPPSLDLGLLYRGGTGGRFPFQSYPTAAPSAQQFFFLDAKSATNNRQLALCPPMFVACFQPPPAVAVQSDSDSSSVVDLHPDYRSPPPQAKAFPLAFDLNLPPPEEIV

SEQ ID NO: 11 - protein, 222 aa, Glycine max
  REGION 24..75: note = Pfam Name: AP2 Pfam Description: AP2 domain
  REGION 1..222: note = Public GI ID no. 190361125
  REGION 1..222: note = Bit score of 519.9 for HMM based on sequences of Figure 4
  REGION 1..222: note = Functional Homolog Of SEQ ID NO. 1
MAPRDHKTSNAKANGNGNSGVKEVHFRGVRKRPWGRYAAEIRDPGKKSRVWLGTFDTAEEAARAYDAAAREFRGPKAKTNFPLPLENVKNSSPSQSSTVESSSRDRDVAADSSPLDLNLAPAAAASARFPFQHQFPVFTGAVPAANQVLYFDAVLRAGMAGPRGFAFGYNHHPVAASEFHATTSDSDSSSVIDLNHNEGEVKGNGSRIFDLDLNHPPPHEIA

SEQ ID NO: 12 - protein, 239 aa, Stylosanthes hamata
  REGION 19..70: note = Pfam Name: AP2 Pfam Description: AP2 domain
  REGION 1..239: note = Public GI ID no. 4099921
  REGION 1..239: note = Bit score of 540.5 for HMM based on sequences of Figure 4
  REGION 1..239: note = Functional Homolog Of SEQ ID NO. 1
MAPREKTPAVKVNAGVKEVHFRGVRKRPWGRYAAEIRDPGKKSRVWLGTFDTAEDAARAYDAAAREFRGPKAKTNFPFPDSDDINSNNNNIVVVKNNNRSPSQSSTVESSSRDRDSYSAAAAATAVADSSPLDLNLAPAGAGFAGSIRFPFQQPFAVFPGGMPAAKQALYLDAVLRASMASHGQFGFGYNRPAAAAAGAQSDSDSSSVIDLNQNEGDVAKNNGRGLVLDLNEPPPQEMA

SEQ ID NO: 13 - protein, 220 aa, Vitis vinifera
  REGION 20..71: note = Pfam Name: AP2 Pfam Description: AP2 domain
  REGION 1..220: note = Public GI ID no. 147844573
  REGION 1..220: note = Bit score of 510.1 for HMM based on sequences of Figure 4
  REGION 1..220: note = Functional Homolog Of SEQ ID NO. 1
  UNSURE 81: note = X is any aa, unknown, or other
  UNSURE 88: note = X is any aa, unknown, or other
MAPRDKPTGVTAGATGNKEIRYRGVRKRPWGRYAAEIRDPGKKSRVWLGTFDTAEEAARAYDAAAREFRGAKAKTNFPSPXDLAAAAXTTANRSPSQSSTVESSSREALSPGAIAGPPALDLNLSHPAAAGQFSAVRYPAVGVFPIAQPLFFFEPFSRPEKPKTHRDMFDLDRAVADFHPAIAGSVHSDSDSSSVVDFNYHDRSTRLLNLDLNHPPAEVA

SEQ ID NO: 14 - protein, 258 aa, Jatropha curcas
  REGION 29..80: note = Pfam Name: AP2 Pfam Description: AP2 domain
  REGION 1..258: note = Public GI ID no. 67906426
  REGION 1..258: note = Bit score of 587.1 for HMM based on sequences of Figure 4
  REGION 1..258: note = Functional Homolog Of SEQ ID NO. 1
MESKNRKWLQERSNSTGNNLNQNSNTAETRYRGVRKRPWGRYAAEIRDPGKKTRVWLGTFDTAEEAARAYDAAAREFRGSKAKTNFPTVTELNNAAAAAVAAGAVTVARSPSQSSTVESSSPTPPRAASPPPPLDLTLNIPSHQHHHLRHGHFPTGVIFPGGAWISLAAEAHPVFFFDAFSVQGESNNNNKNNIINNNKIHSKNINLCRLDRTVMVSSGVHSDSDSSSVVVDYDHDRSPCNKGLSLDLDLNFPPAEVA

SEQ ID NO: 15 - protein, 225 aa, Nicotiana tabacum
  REGION 25..76: note = Pfam Name: AP2 Pfam Description: AP2 domain
  REGION 1..225: note = Public GI ID no. 57012757
  REGION 1..225: note = Bit score of 527.9 for HMM based on sequences of Figure 4
  REGION 1..225: note = Functional Homolog Of SEQ ID NO. 1
MAVKNKVSNGNLKGGNVKTDGVKEVHYRGVRKRPWGRYAAEIRDPGKKSRVWLGTFDTAEEAAKAYDTAAREFRGPKAKTNFPSPTENQSPSHSSTVESSSGENGVHAPPHAPLELDLTRRLGSVAADGGDNCRRSGEVGYPIFHQQPTVAVLPNGQPVLLFDSLWRAGVVNRPQPYHVTPMGFNGVNAGVGPTVSDSSSAVEENQYDGKRGIDLDLNLAPPMEF

SEQ ID NO: 16 - protein, 235 aa, Oryza sativa
  REGION 32..83: note = Pfam Name: AP2 Pfam Description: AP2 domain
  REGION 1..235: note = Public GI ID no. 56567583
  REGION 1..235: note = Bit score of 545.8 for HMM based on sequences of Figure 4
  REGION 1..235: note = Functional Homolog Of SEQ ID NO. 1
  source 1..235: note = Oryza sativa subsp. indica
MAPRAATVEKVAVAPPTGLGLGVGGGVGAGGPHYRGVRKRPWGRYAAEIRDPAKKSRVWLGTYDTAEEAARAYDAAAREFRGAKAKTNFPFASQSMVGCGGSPSSNSTVDTGGGGVQTPMRAMPLPPTLDLDLFHRAAAVTAVAGTGVRFPFRGYPVARPATHPYFFYEQAAAVAAAEAGYRMMKLAPPVTVAAVAQSDSDSSSVVDLAPSPPAVTANKAAAFDLDLNRPPPVEN

SEQ ID NO: 17 - protein, 246 aa, Triticum aestivum
  REGION 32..83: note = Pfam Name: AP2 Pfam Description: AP2 domain
  REGION 1..246: note = Public GI ID no. 84795246
  REGION 1..246: note = Bit score of 560.2 for HMM based on sequences of Figure 4
  REGION 1..246: note = Functional Homolog Of SEQ ID NO. 1
MAPRAAEKAPVSPPTGLGLGVGGGIGVVAGGAHYRGVRKRPWGRYAAEIRDPAKKSRVWLGTYDTAEEAARAYDTAAREFRGAKAKTNFPFPSSSLSPVAAAGGGGGSPSSDSTLDSSGGGSGGCAQAPMQAIPLPPALDLDLFHRAAVVTAVAGGGMRFPFNGYPVAPRQPMHPYFFYEQAAAAAAAASGYRALKVAQPVTVAAVARSDSDSSSVVDLSPSPPAVTAHKAVAFDLDLNRPPPSED

SEQ ID NO: 18 - protein, 247 aa, Triticum aestivum
  REGION 32..83: note = Pfam Name: AP2 Pfam Description: AP2 domain
  REGION 1..247: note = Public GI ID no. 84795248
  REGION 1..247: note = Bit score of 552.7 for HMM based on sequences of Figure 4
  REGION 1..247: note = Functional Homolog Of SEQ ID NO. 1
MAPRAAEKAPVSPPTGLGLGVGGGIGVVAGGAHYRGVRKRPWGRYAAEIRDPAKKSRVWLGTYDTAEEAARAYDTAAREFRGAKAKTNFPFPSSSLSPVAAAGGGGGSPSSDSTLDSSGGGSGGCAQAPMQAIPLPPALDLDLFHRAAVVTAVAGGGMRFPFNGYPVAPRQPLHPYFFYEQAAAAAAASASGYRALKVAQPVTVAAVAQSDSDSSSVVDLSPSPPAVTAHKAVAFDLDLNRPPPSED

SEQ ID NO: 19 - DNA, 1072 bp, Panicum virgatum
  misc_feature 1..1072: note = Ceres Clone ID no. 1805203
  misc_feature 1..1072: note = Encodes the peptide sequence at SEQ ID NO. 20
  source 1..1072: mol_type = unassigned DNA
ataccccacacacacccccaccctctctgccctgagctcttcgccgaaccggaacgcccgcacacccacgccacttgtacaccatggcgccccgggcggcgcacaagtcgccggtgccgccggccaccggcctcggtctcggcgtcgtcggtggcgtgggcatgggcccgcacttcaggggcgtgcggaagcgcccgtgggggcggtacgccgcggagatccgcgacccggccaagaagagccgcgtctggcttggcacgtacgacacggccgaggaggccgcccgcgcctacgacgccgccgcgcgcgagttccgcggcgccaaggccaagaccaacttcccgttcgcgtccaagtgccccgtcgccgccggcgccggcagccccagcagcaacagcaccgtggagtcgggcggaggcggcggcggctgcggcgtccaggcgcctatgctggccatgccgctgcccccggccctcgatctcgatctcttccgccgggcggcggccgtgaccgcggtctcccccggcggcatgcggtttcccttcaaagggtaccctgtcgcgcgcccgaccccgaacccctacttctacgaacaggtggccgcggccgccgccgcggcgtccggctaccggatgctcaaggtcgccccgccgccggtcaccgcggccgccgtcgcgcagagcgactccgactcctcgtcggtggtcgatcacaccccttcgccgcccgcggttaccgcgaagaaggaggtctccttcgatctggatctgaactggccgccgccggcggagaactagccacaccagagtttttagctgacgacttcgtagtttctctttcctttttgcctcgaggaatattacttctgttgtttttttggtcctctagcctgtagtttttgttcagtagcctgcgagagacggaggagcctgtgtaaatagtttttccgccgagggcggaattgatctgagatctgttcgtctgtctagacagatcaaaccggcgctgatatggagtaaattatgtactactagtatttcattccattagcatcaagcggatattattattc

SEQ ID NO: 20 - protein, 237 aa, Panicum virgatum
  REGION 29..80: note = Pfam Name: AP2 Pfam Description: AP2 domain
  REGION 1..237: note = Ceres Clone ID no. 1805203
  REGION 1..237: note = Bit score of 558.6 for HMM based on sequences of Figure 4
  REGION 1..237: note = Functional Homolog Of SEQ ID NO. 1
MAPRAAHKSPVPPATGLGLGVVGGVGMGPHFRGVRKRPWGRYAAEIRDPAKKSRVWLGTYDTAEEAARAYDAAAREFRGAKAKTNFPFASKCPVAAGAGSPSSNSTVESGGGGGGCGVQAPMLAMPLPPALDLDLFRRAAAVTAVSPGGMRFPFKGYPVARPTPNPYFYEQVAAAAAAASGYRMLKVAPPPVTAAAVAQSDSDSSSVVDHTPSPPAVTAKKEVSFDLDLNWPPPAEN

SEQ ID NO: 21 - DNA, 864 bp, Zea mays
  misc_feature 1..864: note = Ceres Clone ID no. 101497672
  misc_feature 1..864: note = Encodes the peptide sequence at SEQ ID NO. 22
  source 1..864: mol_type = unassigned DNA
tcgctgtaccagaagacccgcacacacacgccacttgtattaccatggcgccccgggtggcggacaagtcgccgctaccgccggccaccggcctggggctgggcgttggcggaggagtcgggggcgtgggcatgggcccgcactacagaggcgtgaggaagcgtccatggggacgctacgccgccgagatccgcgaccctgccaagaaaagccgtgtgtggctcggcacgtacgacacggccgaggaggccgccaaggcgtacgattccgccgcccgcgagttccgaggcgccaaggccaagacgaacttcccgttcccctcccagtgctccgtcgcctccgttgctgccggtagcgctagtagcaacagcaccgtggattcgagcggtggcggtagcggctgtggcatccaggcgcctatgcaggccatgccgcttcctccggctytcgatctcgrcctcttccatcgggcggccgccgtgaacgcagtctcccccggcatgcggtttccgttcaagggctatcctgtcgcctgcccgacgccccagcagtactttttctacgagcaggcagcggccgcggctgccgcggcatccggataccggatgctcaaggtcgctcccccggccgtgactgtggccgcggttgcgcagagcgactccgactcgtcgtctgtggttgatcactccccttcgcctcccgcggtgacggaaaacaaggtgggcttcgaactggatctgaactggcccccgccggcagagaactaggcaggccggagtttttggctgacgacttagtagcttctttttcccttttgccttcatcaggaatgttacttgtggttgtttggtcctgtatggctgt

SEQ ID NO: 22 - protein, 240 aa, Zea mays
  REGION 32..83: note = Pfam Name: AP2 Pfam Description: AP2 domain
  REGION 1..240: note = Ceres Clone ID no. 101497672
  REGION 1..240: note = Bit score of 569.4 for HMM based on sequences of Figure 4
  REGION 1..240: note = Functional Homolog Of SEQ ID NO. 1
  UNSURE 135: note = X is any aa, unknown, or other
  UNSURE 138: note = X is any aa, unknown, or other
MAPRVADKSPLPPATGLGLGVGGGVGGVGMGPHYRGVRKRPWGRYAAEIRDPAKKSRVWLGTYDTAEEAAKAYDSAAREFRGAKAKTNFPFPSQCSVASVAAGSASSNSTVDSSGGGSGCGIQAPMQAMPLPPAXDLXLFHRAAAVNAVSPGMRFPFKGYPVACPTPQQYFFYEQAAAAAAAASGYRMLKVAPPAVTVAAVAQSDSDSSSVVDHSPSPPAVTENKVGFELDLNWPPPAEN

SEQ ID NO: 23 - DNA, 1059 bp, Zea mays
  misc_feature 1..1059: note = Ceres Clone ID no. 224845
  misc_feature 1..1059: note = Encodes the peptide sequence at SEQ ID NO. 24
  source 1..1059: mol_type = unassigned DNA
ctagacgccacacacacacatcgcttctccacacgacctcgctgaaccggaagacccgcacacacacgccacttgtgcaccatggcgccccgggtggcggacaagtcgccattgccgctggccaccggcctgaagctgggcgtaggcggaggcatgggcctgggtccacactaccgaggcgtgaggaagcggccgtggggacgttacgccgcggagatccgcgacccagccaagaagagtcgcgtgtggctgggcacgtacgacacggccgaggaggccgccaaggcctacgacgtcgccgcccgcgagttccgtggcgccaaggccaagactaacttcccgttccccctcgccgtcgccgtcgccgtcgccggcggtgctggtagccccagcagcgacagcaccaccttggaatcgagctgtggcggcagcgggtgtggcgtcgaagcgcctgtgcaggcggccatgccgctgaccccggccctcgacctcgatctcttccaccgggcggccgccgtcagcgcggtcaccaccggcggcatgccctttccgttcaaggccttccccgtcgtgcgcccgaccccacatcagtacttcctctacaatcaggccgcggcggccgcggcagccgggtacaggatggtcaaggtcgcctcagctccagtcaccgtagccgccgtcgcgcagagcgactccgactcctcgtctgtggttgatcgcacctgttcgcctcccgcggtgacggcaaagaaggaggtcagcttcgaactggatctgaactggccgccgccggcagagaactagtcgcaccggagttttcagctgacgactttgcagtttcctttttcccttttggccttcatcaggaattgtagtgtagctctgggtgtttggtcttttttttttcttgcatgtagagtgtagactatgatatggtggagccttgtacatagtactgtagtgttttttttttccgccgagacggagtagatctgttcgtgtgtctggacagatcaaaccggcgttgatatgggctttaaaccatggagcatgttgatt

SEQ ID NO: 24 - protein, 240 aa, Zea mays
  REGION 29..80: note = Pfam Name: AP2 Pfam Description: AP2 domain
  REGION 1..240: note = Ceres Clone ID no. 224845
  REGION 1..240: note = Bit score of 487.2 for HMM based on sequences of Figure 4
  REGION 1..240: note = Functional Homolog Of SEQ ID NO. 1
MAPRVADKSPLPLATGLKLGVGGGMGLGPHYRGVRKRPWGRYAAEIRDPAKKSRVWLGTYDTAEEAAKAYDVAAREFRGAKAKTNFPFPLAVAVAVAGGAGSPSSDSTTLESSCGGSGCGVEAPVQAAMPLTPALDLDLFHRAAAVSAVTTGGMPFPFKAFPVVRPTPHQYFLYNQAAAAAAAGYRMVKVASAPVTVAAVAQSDSDSSSVVDRTCSPPAVTAKKEVSFELDLNWPPPAEN

SEQ ID NO: 25 - protein, 236 aa, Oryza sativa
  REGION 36..87: note = Pfam Name: AP2 Pfam Description: AP2 domain
  REGION 1..236: note = Public GI ID no. 115464685
  REGION 1..236: note = Bit score of 429.0 for HMM based on sequences of Figure 4
  REGION 1..236: note = Functional Homolog Of SEQ ID NO. 1
  source 1..236: note = Oryza sativa subsp. japonica
MAPRTSDKTMSPAAAATGLALGVGGVAGAAAVGTGQHFRGVRKRPWGRYAAEIRDPAKKSRVWLGTFDTAEEAARAYDAAAREYRGAKAKTNFPYPNGAPAAGVNSGSSNSSTVESFGSDVQAPMKAMPIPPSLELDLFHRAAAAAAAGAGGMRFPFEGYPVSHPYYFFGQAAAAAAASGCRMLKIAPAPVTVAALAQSDSDSSSIVDLAPSPPAALAKKAIAFDLDLNCPPPMEV

SEQ ID NO: 26 - DNA, 1065 bp, Zea mays
  misc_feature 1..1065: note = Ceres Clone ID no. 1287030
  misc_feature 1..1065: note = Encodes the peptide sequence at SEQ ID NO. 27
  source 1..1065: mol_type = unassigned DNA
aaaaatcccagacgccacgccacccaacacatacaaacacacgcacgcgcgcgcgcgcgcctcccgctgttccgcaaaacaaaggaaacgaaggagaggaggccatggcgccgagaacgtcagagaaaaccatggcaccggcggcggccgctgccacggggctcgcgctcagcgtcggcggcggcggcggggccggcggcccgcactacagaggcgtgaggaagcggccgtggggccggtacgcggcggagatccgcgacccggcgaagaagagccgggtgtggctcggcacctacgacacggccgaggacgccgcgcgggcctacgacgccgccgcgcgcgagtaccgcggcgccaaggccaagaccaacttcccttacccctcgtgcgtgcccctctccgcagccggttgccggagcagcaacagcagcaccgtcgagtccttcagcagcgacgcgcaggcgcccatgcaggccatgccgctcccgccgtcgctcgagctggacctgttccaccgcgcggcggccgcggccacgggcacgggcgctgccgccgtacgcttccctttcggcagcatccccgttacgcacccgtactacttcttcgggcaggccgcagccgcagccgcggaagcagggtgccgtgtgctcaagctggcgccggcggtcaccgtggcgcagagcgactccgactgttcgtcggtagtggatctgtcgccgtcgccaccggccgctgtgtcggcgaggaagcccgccgcgttcgatctcgacctgaactgctcaccgccgacggaggcggaagcctagtcgtcgaagcttttaatgactgtctgtcttcttagttctttcttctcctttttctcgaggaaaattcggtactactaagctgagagacgctctcctccgacagacgacgtcgacgacgggcatttttgtaaatagtttttgcgccgggacctttttagtttatgatgaaagctgtattgtcaccgaagacaggtcctgccggcgttgttatggaccggattactatattatattatgcactactagtattttgatagcc

SEQ ID NO: 27 - protein, 233 aa, Zea mays
  REGION 33..84: note = Pfam Name: AP2 Pfam Description: AP2 domain
  REGION 1..233: note = Ceres Clone ID no. 1287030
  REGION 1..233: note = Bit score of 386.2 for HMM based on sequences of Figure 4
  REGION 1..233: note = Functional Homolog Of SEQ ID NO. 1
MAPRTSEKTMAPAAAAATGLALSVGGGGGAGGPHYRGVRKRPWGRYAAEIRDPAKKSRVWLGTYDTAEDAARAYDAAAREYRGAKAKTNFPYPSCVPLSAAGCRSSNSSTVESFSSDAQAPMQAMPLPPSLELDLFHRAAAAATGTGAAAVRFPFGSIPVTHPYYFFGQAAAAAAEAGCRVLKLAPAVTVAQSDSDCSSVVDLSPSPPAAVSARKPAAFDLDLNCSPPTEAEA

SEQ ID NO: 28 - DNA, 774 bp, Sorghum bicolor
  misc_feature 1..774: note = Ceres Annot ID no. 8733383
  misc_feature 1..774: note = Encodes the peptide sequence at SEQ ID NO. 29
  source 1..774: mol_type = unassigned DNA
atggcgccgagaacgtcagagaaaacgatgacaccggcggcggcggctgccgccacggggctcgcgcttagcgtcagcggcggagccggagccagcggcccgcacttcagaggcgtcaggaagcggccgtggggccggtacgccgcggagatccgcgacccggccaagaagagccgcgtgtggctcggcacgttcgacacggccgaggaggctgcgcgggcctacgacgccgccgcgcgcgactaccgcggcccaaaggccaagaccaacttccctttcccttcgtcgtgcatgccactcgccgccggcgccggcgccggcagcttgcctgcggcgaaggccgtcaccggtggcggcggcagccggagcagcaacagcagcaccgtcgagtctttcagcagcggcagcgacgtgcaggcggcgcccatgcaggccatgccgctcccaccgtctctggagctcgacctgttccaccgcgcggcggctgcgggcacgggcacgggcggcgccgccgtacggttccctttcaacagctaccccgtgacgcacccgtactatttcttcgggcaggccgctgctgccgcggcggcagggtgccacatgctcaagctggcaccgacggtgaccgtggcggccgtggcgcagagcgactccgactcctcgtcggtcgtggatctgtcgccatcgccgccggccgccgtgtcgacgcagaaggccgccgccgcgttcgatcttgacctgaactgcccaccgccggcggagatggaggcctag

SEQ ID NO: 29 - protein, 257 aa, Sorghum bicolor
  REGION 34..85: note = Pfam Name: AP2 Pfam Description: AP2 domain
  REGION 1..257: note = Ceres Annot ID no. 8733383
  REGION 1..257: note = Bit score of 425.4 for HMM based on sequences of Figure 4
  REGION 1..257: note = Functional Homolog Of SEQ ID NO. 1
MAPRTSEKTMTPAAAAAATGLALSVSGGAGASGPHFRGVRKRPWGRYAAEIRDPAKKSRVWLGTFDTAEEAARAYDAAARDYRGPKAKTNFPFPSSCMPLAAGAGAGSLPAAKAVTGGGGSRSSNSSTVESFSSGSDVQAAPMQAMPLPPSLELDLFHRAAAAGTGTGGAAVRFPFNSYPVTHPYYFFGQAAAAAAAGCHMLKLAPTVTVAAVAQSDSDSSSVVDLSPSPPAAVSTQKAAAAFDLDLNCPPPAEMEA

SEQ ID NO: 30 - protein, 236 aa, Triticum aestivum
  REGION 36..87: note = Pfam Name: AP2 Pfam Description: AP2 domain
  REGION 1..236: note = Public GI ID no. 84795240
  REGION 1..236: note = Bit score of 405.9 for HMM based on sequences of Figure 4
  REGION 1..236: note = Functional Homolog Of SEQ ID NO. 1
MAPRTSDKTATPPAAGAAATGLALGVGGGNGGGVGPHYRGVRKRPWGRYAAEIRDPAKKSRVWLGTYDTAEEAARAYDAAAREYRGNKAKTNFPFATASAPPAAAAALTVDGSRSSNSSTVESFGGDVQAPMQAMPLPPSLDLDLFHRAATSTAGAGMRFPFSGYPVSHPYYFFGQAAAAAAAGCHMYSQAPKVTVASVSPSDSDSSSVVDLAPSPPARKPVPFELDLNCPPPAEL

SEQ ID NO: 31 - DNA, 1048 bp, Panicum virgatum
  misc_feature 1..1048: note = Ceres Clone ID no. 1806017
  misc_feature 1..1048: note = Encodes the peptide sequence at SEQ ID NO. 32
  source 1..1048: mol_type = unassigned DNA
aagcctagacgccaccccctcctcccctacacacacgccgcaggcgcgcgcctcccgcacaaaggaaaagaacgaggccatggcgccgagaacgtcggagaaaacgatggcaccggcggcgtccccggggctcgcgctcggcgtcggcggcggcggcggcccgcacttccgcggcgtcaggaagcgcccgtggggccggttcgcggcggagatccgcgacccggccaagaagagccgcttgtggctcggcacgttcgacacggccgaggaggccgcgcgggcctacgacgccgccgcgcgcgagtaccgcggcgccaaggccaagaccaacttcccctacccttcgtcggcgtccgtgcccccggccgccaccgccggcagccggagcggcgacagcagcaccgtggagtccttcggcggcgacgtgcaggcgcccatgcaggccatgccgctgccgccgtcgctcgagctggacctgttccaccgcgcggcggccgcgggcgccggcgccggcgtgcgcttcccgttcagcggctaccccgtgacgcacccctactacatcttcagccaggccgccgcggccgccgccgcggggtgccacatgcagctgaagctgccgccgacggtgaccgtggcggccgtggtgcaaagcgactccgactcctcgtcggtcgtggacctgtcgccgccgccgctcgccgccgccgggtcggcgaagaaggcctccgcgttcgatctcgatctgaactccccgccgccggcggaggcggaggcctagtagccggagtttagctgatgactggcactagttcctttcttcgtttcttccttcgcctttttcccctagaagaaacttggctgtatgtttacgcgtaggccctctctcttaccagaccagagagggaggacatttttgtaaatagtttttccgccggggatctaagctctagctgatgataaaaaaaaaagctgtattgtcatccaagacaggtcctgccggcgttgtcatggaccggattatattaattaattaagtgttttgatagtc

SEQ ID NO: 32 - protein, 232 aa, Panicum virgatum
  REGION 28..79: note = Pfam Name: AP2 Pfam Description: AP2 domain
  REGION 1..232: note = Ceres Clone ID no. 1806017
  REGION 1..232: note = Bit score of 405.8 for HMM based on sequences of Figure 4
  REGION 1..232: note = Functional Homolog Of SEQ ID NO. 1
MAPRTSEKTMAPAASPGLALGVGGGGGPHFRGVRKRPWGRFAAEIRDPAKKSRLWLGTFDTAEEAARAYDAAAREYRGAKAKTNFPYPSSASVPPAATAGSRSGDSSTVESFGGDVQAPMQAMPLPPSLELDLFHRAAAAGAGAGVRFPFSGYPVTHPYYIFSQAAAAAAAGCHMQLKLPPTVTVAAVVQSDSDSSSVVDLSPPPLAAAGSAKKASAFDLDLNSPPPAEAEA

SEQ ID NO: 33 - protein, 236 aa, Triticum aestivum
  REGION 36..87: note = Pfam Name: AP2 Pfam Description: AP2 domain
  REGION 1..236: note = Public GI ID no. 84795242
  REGION 1..236: note = Bit score of 404.0 for HMM based on sequences of Figure 4
  REGION 1..236: note = Functional Homolog Of SEQ ID NO. 1
MAPRTSDKTATPPAAGAAATGLALGVGGGNGGGVGTHYRGVRKRPWGRYAAEIRDPAKKSRVWLGTYDTAEEAARAYDAAAREYRGNKAKTNFPFASASAPPAAAAALTGDGSRSSNSSTVESFGGDVQAPMQAMPLPPSLELDLFHRAATSTAGAGMRFPFSGYPVSHPYYFFGQAAAAAAAGCHMYSQAPKVTVASVSPSDSDSSSVVDLAPSPPTRKPVPFDLDLNCPPPAEL

SEQ ID NO: 34 - protein, 240 aa, Triticum aestivum
  REGION 37..88: note = Pfam Name: AP2 Pfam Description: AP2 domain
  REGION 1..240: note = Public GI ID no. 84795238
  REGION 1..240: note = Bit score of 404.4 for HMM based on sequences of Figure 4
  REGION 1..240: note = Functional Homolog Of SEQ ID NO. 1
MAPRTSDKTATPPAAGAAATGLALGVGGGGNGGGVGPHYRGVRKRPWGRYAAEIRDPAKKSRVWLGTYDTAEEAARAYDAAAREYRGNKAKTNFPFASASAPPAAAALTGDGSRSSNSSTVESFGGDVQAPMQAMPLPPSLELDLFHRAATSTAGAGAGAGMRFPFSGYPVSHPYYFFGQAAAAAAGGCHMYSQAPKVTVASVSPSDSDSSSVVDLAPSPPSRKPVPFDLDLNCPPPAEL

SEQ ID NO: 35 - DNA, 778 bp, Musa acuminata
  misc_feature 1..778: note = Ceres Clone ID no. 1733772
  misc_feature 1..778: note = Encodes the peptide sequence at SEQ ID NO. 36
  source 1..778: mol_type = unassigned DNA
gagaaagtagagagagaagacggactccttgctgtggcgctacgagagaacccgatggccggcggcggtgggagagctggcggtggaggaagagcaggggggaaggagacccattaccgaggggtgaggaagcggccttgggggaggtacgctgcggagatacgggacccggggaagaagagccgggtctggctcgggacctttgacacggccgaggaggccgcgcgggcatacgatgccgccgcccggcagttccgtggatccaaggccaagaccaacttcccccacccggaggcgtacacgaggccgggcccggccggagtcgtcgcgatcgcgaccccggcggcgggtggcggcagccccagcagccagagcagcacggtggagtcctccagccgcgaggtgccgccactcgcgatccctctcccgccctcgctcgactttgatctcctccgccgccgcgtcgcgcggttcccattccagccctaccccgcggtcgccgccccagccatgccggcatcccgcccgtgctgcctcttcgacacgatcgtcggatccgagaaggcgtcggcggcggtgtccatgaaccgccgccgcttttgcccgtccatgatcatcgccgatatgcacgctccaacggccagcggcgttttgagcgattccgactcctactccgtcgccgacgtgcgcctcaaccaccgcttccgggggccgcacaagatgctgacgctcgatttagatctcaacctgccccctccacccgagatcgcctgatgtg

SEQ ID NO: 36 - protein, 239 aa, Musa acuminata
  REGION 19..70: note = Pfam Name: AP2 Pfam Description: AP2 domain
  REGION 1..239: note = Ceres Clone ID no. 1733772
  REGION 1..239: note = Bit score of 341.7 for HMM based on sequences of Figure 4
  REGION 1..239: note = Functional Homolog Of SEQ ID NO. 1
MAGGGGRAGGGGRAGGKETHYRGVRKRPWGRYAAEIRDPGKKSRVWLGTFDTAEEAARAYDAAARQFRGSKAKTNFPHPEAYTRPGPAGVVAIATPAAGGGSPSSQSSTVESSSREVPPLAIPLPPSLDFDLLRRRVARFPFQPYPAVAAPAMPASRPCCLFDTIVGSEKASAAVSMNRRRFCPSMIIADMHAPTASGVLSDSDSYSVADVRLNHRFRGPHKMLTLDLDLNLPPPPEIA

SEQ ID NO: 37 - protein, 220 aa, Vitis aestivalis
  REGION 20..71: note = Pfam Name: AP2 Pfam Description: AP2 domain
  REGION 1..220: note = Public GI ID no. 37625037
  REGION 1..220: note = Bit score of 513.7 for HMM based on sequences of Figure 4
  REGION 1..220: note = Functional Homolog Of SEQ ID NO. 1
MAPRDKPTGVTAGATGNKEIRYRGVRKRPWGRYAAEIRDPGKKSRVWLGTFDTAEEAARAYDAAAREFRGAKAKTNFPSPTDLAAAAATTANRSPSQSSTVESSSREALSPGAIAGPPALDLNLSHPAAAGQFSAVRYPAVGVFPIAQPLFFFEPFSRPEKPKTHRDMFDLDRAVADFHPAIAGSVHSDSDSSSVVDFNYHDRSTRLLNLDLNHPPAEVA

SEQ ID NO: 38 - protein, 249 aa, Vitis aestivalis
  REGION 19..70: note = Pfam Name: AP2 Pfam Description: AP2 domain
  REGION 1..249: note = Public GI ID no. 37625035
  REGION 1..249: note = Bit score of 392.3 for HMM based on sequences of Figure 4
  REGION 1..249: note = Functional Homolog Of SEQ ID NO. 1
MAPKEKVAGVKPSANAKEVHFRGVRKRPWGRYAAEIRDPGKKSRVWLGTFDTAEEAAKAYDSAAREFRGAKAKTNFPLVSENLNNNNQSPSQSSTVESSSREGFSPALMVDSSPLDLNLLHGGGVGVGVGVGVGAAAGYATAMRFPFQHHQFQVSSPSPAAGIVPTGGLPAANHLFYFDAMLRTGRVNQDFQRLRFDRAASDFRAALTGGVQSDSDSSSVVDLNHNDLKPRARVLIDLDLNRPPPPEIA

SEQ ID NO: 39 - protein, 249 aa, Vitis vinifera
  REGION 19..70: note = Pfam Name: AP2 Pfam Description: AP2 domain
  REGION 1..249: note = Public GI ID no. 147805535
  REGION 1..249: note = Bit score of 389.4 for HMM based on sequences of Figure 4
  REGION 1..249: note = Functional Homolog Of SEQ ID NO. 1
MAPKEKVAGVKPSANAKEVHFRGVRKRPWGRYAAEIRDPGKKSRVWLGTFDTAEEAAKAYDSAAREFRGAKAKTNFPLVSENLNNNNQSPSQSSTVESSSREGFSPALMVDSSPLDLNLLHGGGVGVGVGVGVGAAAGYATALRFPFQHHQFQVSSPSPAAGIVPTGGLPAANHLFYFDAMLRTGRVNQDFQRLRFDRAASDFRAALTGGVQSDSDSSSVVDLNHNDLKPRARVLIDLDLNRPPPPEIA

SEQ ID NO: 40 - protein, 227 aa, Vitis vinifera
  REGION 19..70: note = Pfam Name: AP2 Pfam Description: AP2 domain
  REGION 1..227: note = Public GI ID no. 157358724
  REGION 1..227: note = Bit score of 387.3 for HMM based on sequences of Figure 4
  REGION 1..227: note = Functional Homolog Of SEQ ID NO. 1
MAPKEKVAGVKPSANAKEVHFRGVRKRPWGRYAAEIRDPGKKSRVWLGTFDTAEEAAKAYDSAAREFRGAKAKTNFPLVSENLNNNNQSPSQSSTVESSSREGFSPALMVDSSPLDLNLLHGGGVGHHQFQVSSPSPAAGIVPTGGLPAANHLFYFDAMLRTGRVNQDFQRLRFDRAASDFRAALTGGVQSDSDSSSVVDLNHNDLKPRARVLIDLDLNRPPPPEIA

SEQ ID NO: 41 - protein, 238 aa, Stylosanthes hamata
  REGION 23..74: note = Pfam Name: AP2 Pfam Description: AP2 domain
  REGION 1..238: note = Public GI ID no. 4099914
  REGION 1..238: note = Bit score of 486.6 for HMM based on sequences of Figure 4
  REGION 1..238: note = Functional Homolog Of SEQ ID NO. 1
MAPREKTPAVKVNGKSNAGVKEVHFRGVRKRPWGRYAAEIRDPGKKSRVWLGTFDTAEDAARAYDAAAREFRGPKAKTNFPFPDSDDINNNNIVVVKNNNRSPSQSSTVESSSRDRDSYSAAAATAVADSSPLDLNLAPQELDSPDPFGSHSTQPFAVFPGGMPAAKQALYLDAVLRASMASHGQFGFGYNRPAAAGAQSDSDSSSVIDLNQNEGDVAKNNGRGLVLDLNEPPPQEMA

SEQ ID NO: 42 - DNA, 681 bp, Populus balsamifera
  misc_feature 1..681: note = Ceres Annot ID no. 1520029
  misc_feature 1..681: note = Encodes the peptide sequence at SEQ ID NO. 43
  source 1..681: mol_type = unassigned DNA; note = Populus balsamifera subsp. trichocarpa
atggctcctagagaaagatctaacaacaacaacagcccgaacagccctagatcggagatccgttttagaggcgtcaggaagagaccatggggacgttatgcagctgagatcagagacccaggcaagaaaacgagggtttggctgggcacttttgatactgctgaagaggccgcccgtgcatacgatgcggctgctcgtgaattccgcggagccaaagccaaaactaatttccctacaatcggcgagcttaatcccaaccccacgcgcagtcctagccaaagcagcactgtcgagtcctcctccccaccgcccccacgcgccgcttctcctccaccaccactcgacctcactcttaacatttcccgccataaacccgaccgccagccttttcccaatggagttagttttccaggaggcgcgtggtttccattccctgctgttgcgcgtcccgttttcttcttcgacgcgtttgctcacgcgaagaatgatattcctaacaataatagtatagtgaataatattaacatgtgcaggtttgatcgaacggtgatggtgaatggaggtggggcccagagtgattcggattcatcatcagtcgtcgattacgatcatcgtcgtgatagtaagggattgtcacttgatcttgatcttaacctggccccaccaccggaagtctcgtga

SEQ ID NO: 43 - protein, 226 aa, Populus balsamifera
  REGION 20..71: note = Pfam Name: AP2 Pfam Description: AP2 domain
  REGION 1..226: note = Ceres Annot ID no. 1520029
  REGION 1..226: note = Bit score of 366.0 for HMM based on sequences of Figure 4
  REGION 1..226: note = Functional Homolog Of SEQ ID NO. 1
  source 1..226: note = Populus balsamifera subsp. trichocarpa
MAPRERSNNNNSPNSPRSEIRFRGVRKRPWGRYAAEIRDPGKKTRVWLGTFDTAEEAARAYDAAAREFRGAKAKTNFPTIGELNPNPTRSPSQSSTVESSSPPPPRAASPPPPLDLTLNISRHKPDRQPFPNGVSFPGGAWFPFPAVARPVFFFDAFAHAKNDIPNNNSIVNNINMCRFDRTVMVNGGGAQSDSDSSSVVDYDHRRDSKGLSLDLDLNLAPPPEVS

SEQ ID NO: 44 - DNA, 983 bp, Zea mays
  misc_feature 1..983: note = Ceres Clone ID no. 1065091
  misc_feature 1..983: note = Encodes the peptide sequence at SEQ ID NO. 45
  source 1..983: mol_type = unassigned DNA
aattatcacaccactctctccctctcctcctttatattttagttatggccaagattggtttgaaacccgatccagttaacaataatgccaaggagattcgttacagaggcgttaggaagaggccatggggccgttatgccgcggagatccgagatccgggtaagaaaacccgggtctggcttggtactttcgataccgccgaagaggcggcgcgtgcttacgatgcggcggcgcgtgatttccgaggggccaaggctaagaccaatttccccaattttctcgagctgagtgagaagatgccggctgccggcggcggtttcgagcgtagcccaagccagagcagcacccttgactgcgattctcctccggcggcggttacgccggcgagtgctgggattgttccgccgcagctcgagcttcgcctcggcggctatcagatcccgatggcgcgtcctatttactttttggacgttatgggagtaggcaacggaggtcgtgctcagcctccggtggcgtcagcttttaggtcgccggtggcttgtgtggctcagagcgactctgattcgtcgtcggttgttgatttcgaaggtgtgatggagaagagatctcagctgtttgatctagatctaaacttgtctcctccgtcggaacaggcctgaacttatcgaaggtggtcgtggtcgtgttcatttccgacgcgcatgcgttttttttttgtttgggagctgagagaattcgtattctcgttagttttttattctctctcactctagaataattattattatcggtttaaaaaaaaaaagtttatcgggagagagaatataattttagctgacatggatcgttatgtacatattattacataactggagatctgaacttttgttgtgtgcttttttgcgacttggtttcaccttgttgttcctctatctgtagcctttaattttgttattgcaaattttatatcaataatttggtga

SEQ ID NO: 45 - protein, 204 aa, Zea mays
  REGION 18..69: note = Pfam Name: AP2 Pfam Description: AP2 domain
  REGION 1..204: note = Ceres Clone ID no. 1065091
  REGION 1..204: note = Bit score of 263.9 for HMM based on sequences of Figure 4
  REGION 1..204: note = Functional Homolog Of SEQ ID NO. 1
MAKIGLKPDPVNNNAKEIRYRGVRKRPWGRYAAEIRDPGKKTRVWLGTFDTAEEAARAYDAAARDFRGAKAKTNFPNFLELSEKMPAAGGGFERSPSQSSTLDCDSPPAAVTPASAGIVPPQLELRLGGYQIPMARPIYFLDVMGVGNGGRAQPPVASAFRSPVACVAQSDSDSSSVVDFEGVMEKRSQLFDLDLNLSPPSEQA

SEQ ID NO: 46 - DNA, 1144 bp, Gossypium hirsutum
  misc_feature 1..1144: note = Ceres Clone ID no. 1793792
  misc_feature 1..1144: note = Encodes the peptide sequence at SEQ ID NO. 47
  source 1..1144: mol_type = unassigned DNA
atctcaaccccacacataaatacccttttaccaaaggagaacattaaaacatagcccaactcttcgttttcttcaagcggaaaacagaaaactgaggctttcccttctcaaatggcaccgagggagaaaacggcggccgtcaagggtactgggaataataacgaggttcatttcagaggagtaaggaagcgtccatgggggcgttacgctgctgagatcagagatccagggaagaagagccgtgtttggctaggaacctttgatacggccgaggaagcagccagagcctacgacgccgccgctagggaatttcgcggcgccaaggccaagactaattttccggtcccttgtgagaatctcagcaaaggtaataactgtaaaagtaatggtaacaacaaccaccatagccctagccagagtagcaccgtggaatcctcgagccgtgagccggcgctcatggtagactcttcgcctttagatctcaacctcgtacaaggtgaggcggttactggttacgtgcctacggctgttagatttcctttccagcaagcttcaccggtgccatatattgcgggccgcaaagttttctactttgaaccgttcgttcggcctggtgcagtgaaaggacacccatttcaacggtttggattcgatcatcatgatcttcatgcgacgtttaatggtgtacaaagcgactctgactcatcatccgtcgttgatttgaaccaccacgaggtcaagtcgcgcccgcttctcaatatcgatctcaaccaacctgccgtgccggaaattgcctgatttattttttaatattcgcagatcgtcaaagcggaaaggcaaaaaagaaaaacgagttttttaaaatttcgttgtttaaacataactttcttagcagtcccgaggaaatatcgaaggtagattttagagaaaatgagaccccaaaaaaaaaaaaagagataaatttacggcaacagctgtgatattttgatgtgatctatcgtggcaatcgaatggcccagattatgtgtatagttagctcaagaactccttttttgcagcagataaacatcagttttgtctgttgttttaataactaattactgtaatttttccctcctatgaattaagcacaacaagtttcctt

SEQ ID NO: 47 - protein, 228 aa, Gossypium hirsutum
  REGION 19..70: note = Pfam Name: AP2 Pfam Description: AP2 domain
  REGION 1..228: note = Ceres Clone ID no. 1793792
  REGION 1..228: note = Bit score of 366.9 for HMM based on sequences of Figure 4
  REGION 1..228: note = Functional Homolog Of SEQ ID NO. 1
MAPREKTAAVKGTGNNNEVHFRGVRKRPWGRYAAEIRDPGKKSRVWLGTFDTAEEAARAYDAAAREFRGAKAKTNFPVPCENLSKGNNCKSNGNNNHHSPSQSSTVESSSREPALMVDSSPLDLNLVQGEAVTGYVPTAVRFPFQQASPVPYIAGRKVFYFEPFVRPGAVKGHPFQRFGFDHHDLHATFNGVQSDSDSSSVVDLNHHEVKSRPLLNIDLNQPAVPEIA

SEQ ID NO: 48 - DNA, 930 bp, Glycine max
  misc_feature 1..930: note = Ceres Clone ID no. 1619220
  misc_feature 1..930: note = Encodes the peptide sequence at SEQ ID NO. 49
  source 1..930: mol_type = unassigned DNA
gaagcctacatatacagcactactctctgatcagttttttcttggtctccgaatcacaaactcttcgaaaaaactaacattaatggctccgagggatatcaatagatctaacgttgttgttgccggaggatccaacccgacccgtaaagagatccgataccgcggcgtgaggaagcggccgtggggccgctacgccgccgagatccgcgatcccggcaagaagacgcgcgtctggctaggaacgttcgacaccgcggaggaggcggcgcgtgcgtacgatgcggcggcgcgtgagttccgcggcgcaaaggctaagaccaatttccccacccacgcggagctgacgcacgcggcggcgcgtagccccagccagagcagcacgttggattcgtcctctcccccgacgccgccgttggacctcactcttgccgccccactcgccgccggtggcgcgttggtgttcccagtggcgcggcccgtggtcttcttcgacgcgttcgagcgtgccgaggtgcgcgcgtcgttcgatcttcccgtggcggcgttcagcgactcggactcgtccacggtcatggattacgagcggggctcacgtcggagagtgttggatcttgaccttaatgtccctcctccgcccgaggttgcctgaaccggaaaaaagatccggttttttcgcagctcggtttttctctctctatctgagtgagtggcgattatcaatttatcgtagtagctgacacggtgctagagtttatgtaaatatattataaatagattacaattaaccaaaccaaaaagaaaaagcaggcttatgtttttttttctctattctgcttttttttttccttttcgcaaaggaagaaggaatttcttacctcactgttgcccggtgatgttaactttttatatatataatgccatttctatatc

SEQ ID NO: 49 - protein, 188 aa, Glycine max
  REGION 24..75: note = Pfam Name: AP2 Pfam Description: AP2 domain
  REGION 1..188: note = Ceres Clone ID no. 1619220
  REGION 1..188: note = Bit score of 283.9 for HMM based on sequences of Figure 4
  REGION 1..188: note = Functional Homolog Of SEQ ID NO. 1
MAPRDINRSNVVVAGGSNPTRKEIRYRGVRKRPWGRYAAEIRDPGKKTRVWLGTFDTAEEAARAYDAAAREFRGAKAKTNFPTHAELTHAAARSPSQSSTLDSSSPPTPPLDLTLAAPLAAGGALVFPVARPVVFFDAFERAEVRASFDLPVAAFSDSDSSTVMDYERGSRRRVLDLDLNVPPPPEVA

SEQ ID NO: 50 - protein, 227 aa, Nicotiana sylvestris
  REGION 25..76: note = Pfam Name: AP2 Pfam Description: AP2 domain
  REGION 1..227: note = Public GI ID no. 57012875
  REGION 1..227: note = Bit score of 505.6 for HMM based on sequences of Figure 4
  REGION 1..227: note = Functional Homolog Of SEQ ID NO. 1
MAVKNKVSNGDLKGGNVKTNGVKEVHYRGVRKRPWGRYAAEIRDPGKKSRVWLGTFDTAEEAAKAYDTAAREFRGPKAKTNFPLPSENQSTSHSSTMESSSGETGIHAPPHAPLELDLTRRLGSVAADGGDNCRRSGEVGYPIFHQQPTVAVLPNGQPVLLFDSLWRPGVVNRPQPYHVMPMAMGFNGVNAGVDPTVSDSSSVVEENQYDGKRGIDLDLNLAPPTEF

SEQ ID NO: 51 - protein, 211 aa, Vitis vinifera
  REGION 16..67: note = Pfam Name: AP2 Pfam Description: AP2 domain
  REGION 1..211: note = Public GI ID no. 147811787
  REGION 1..211: note = Bit score of 301.8 for HMM based on sequences of Figure 4
  REGION 1..211: note = Functional Homolog Of SEQ ID NO. 1
  UNSURE 55: note = X is any aa, unknown, or other
MALKEKVKEGVKAKEPHFRGVRKRPWGRYAAEIRDPTKKSRVWLGTFDTAEEAAXAYDAAAREFRGSKAKTNFPLPNEVLPFPNTDNLTRSPSPSSTVESSSPHAPLELDLTRRLGSSDGGFPFHYQPHVVNSAAVAGVWPHARPVLFLDAFVGAEGFRVNPVTVAYDGGFGSPVQSESDSSSVVDSVQHESSGATRVLGLDLNFPPPLEA

SEQ ID NO: 52 - DNA, 1097 bp, Gossypium hirsutum
  misc_feature 1..1097: note = Ceres Clone ID no. 1842925
  misc_feature 1..1097: note = Encodes the peptide sequence at SEQ ID NO. 53
  source 1..1097: mol_type = unassigned DNA
aacaaataccaacgacaatccccccaccattttttcctctctcaacaaaatttcatcactcttaaacggagcttcctaaatggcgccgagggagaaaacggcggacgtcaagggaaaagggaatgggtgtaataaagaggttcattttagaggagtaaggaagcgtccatggggtcgttacgccgctgagatcagagatccagggaagaaaagccgtgtttggcttggaacttttgatacagctgaggaagcggccaaggcctacgacgccgccgccagagaattccgcggcgccaaggcgaagactaatttccccctccctggtgaaattctcaacaatggtagtaactgtaacaacaatggcgataccaactgcaacaacaacaataacaaccacagccctagccggagtagcaccgtggagtcatcaagccacgagccgccgacactcgtcaagtgttcaccgttggatctcaatctcggacacgctgcggtcaccgggtacggatctcctgcggtcaggcttcctttccctcaaatttcgccggtcgccggttttttcgccaacggcgtctcggcagttgcagccccccaagttttttacttcgacgctttggtccgacccggtgttatgaaaggacagcagtatcaacaacggttgagattcgatcaccgtgattatcacgaaacttttaacgctggtgtacaaagcgactcagattcatcctccgtcgttgatttaaaccaccacgagatcaaacggcgaccgcttctcaatatcgatctcaaccaacctgctccggaagtcgcctgattatgattttttaaaatcgccgatatcaagaaccggaaaagaaaaacccacaaattttcaattttatctctttaaaatcgttaatcttctttttagtcccaattttgaaaattagacgagaaaattatacccaaaaagaaattacgcgagagcggcgtaaattgtgaatacgtagatgaaaaatctcctctttttcgcagcagagtaacgttagtttgttgtctgttgtttcatattaatttctgtaattattttaattttcaatgaattaattagtaattac

SEQ ID NO: 53 - protein, 244 aa, Gossypium hirsutum
  REGION 21..72: note = Pfam Name: AP2 Pfam Description: AP2 domain
  REGION 1..244: note = Ceres Clone ID no. 1842925
  REGION 1..244: note = Bit score of 347.0 for HMM based on sequences of Figure 4
  REGION 1..244: note = Functional Homolog Of SEQ ID NO. 1
MAPREKTADVKGKGNGCNKEVHFRGVRKRPWGRYAAEIRDPGKKSRVWLGTFDTAEEAAKAYDAAAREFRGAKAKTNFPLPGEILNNGSNCNNNGDTNCNNNNNNHSPSRSSTVESSSHEPPTLVKCSPLDLNLGHAAVTGYGSPAVRLPFPQISPVAGFFANGVSAVAAPQVFYFDALVRPGVMKGQQYQQRLRFDHRDYHETFNAGVQSDSDSSSVVDLNHHEIKRRPLLNIDLNQPAPEVA

SEQ ID NO: 54 - protein, 195 aa, Thellungiella halophila
  REGION 24..75: note = Pfam Name: AP2 Pfam Description: AP2 domain
  REGION 1..195: note = Public GI ID no. 20340233
  REGION 1..195: note = Bit score of 245.7 for HMM based on sequences of Figure 4
  REGION 1..195: note = Functional Homolog Of SEQ ID NO. 1
MTKMGFKPDSNPSPNPNESNAKEIRYRGVRKRPWGRYAAEIRDPGKKTRVWLGTFDTAQQAARAYDAAAREFRGAKAKTNFPTFLELNAAKDGGFARSPSQSSTVDSVSPTSARLVTPPQLELSLGGGGGGACYQIPVARRPVYFYNMTTFPAAAAATCGVQSESDSSSVVDFECGAEKKYRPLDLDLNLAPPAE

SEQ ID NO: 55 - DNA, 898 bp, Glycine max
  misc_feature 1..898: note = Ceres Clone ID no. 1657843
  misc_feature 1..898: note = Encodes the peptide sequence at SEQ ID NO. 56
  source 1..898: mol_type = unassigned DNA
attgtttccatttttcaagcctacatatacaacactactttcagttttttctgtctctgaatctcaaactcttcggaaagattaacattaatggctccaagggatatcaatagatccaacgttgttgttgttgccggagtatccaacccgacccataaagagatccgttaccgcggcgtgaggaagcggccgtggggccgctacgccgccgagatccgcgacccaggcaagaagacacgcgtgtggctaggaacgtttgacacggcggaggaggcggcgcgtgcgtatgacacggcggcgcgtgagttccgcggcacgaaggcgaagaccaatttccccacccacgcggcggcggcgcgtagtcccagccagagcagcacgctggactcctcgtctccgccgccgctggaccttactcttgccgccccactcaccgccgcgggcgcgttggttttcccggtggcgcgtcccgtggtgttcttcgacgcttttgcgcgtgccgaggtgcgcgcgtcgttcgatcttcccgtggcggggttcagcgactcggactcgtcctcggtcgtggactacgagcgggtcccacatcggaaagtgttggatcttgaccttaatgtccctcctccgcccgaggttgcctgaaccggcaaaagatccggttttaacgcggctcggtttttttctctctatctgagaatgatgattatcaagttatcattgtagttgacatggtgctagagtttatgtacatagattataattaaccaaacaaaaaaaaaaaagcaggcttatgttttttctctattctgcttttttattttctcaatggaagaagggatttcttacctcattattgccgttgatgttaacttttatatatataaaatagcatttatat

SEQ ID NO: 56 - protein, 183 aa, Glycine max
  REGION 25..76: note = Pfam Name: AP2 Pfam Description: AP2 domain
  REGION 1..183: note = Ceres Clone ID no. 1657843
  REGION 1..183: note = Bit score of 273.8 for HMM based on sequences of Figure 4
  REGION 1..183: note = Functional Homolog Of SEQ ID NO. 1
MAPRDINRSNVVVVAGVSNPTHKEIRYRGVRKRPWGRYAAEIRDPGKKTRVWLGTFDTAEEAARAYDTAAREFRGTKAKTNFPTHAAAARSPSQSSTLDSSSPPPLDLTLAAPLTAAGALVFPVARPVVFFDAFARAEVRASFDLPVAGFSDSDSSSVVDYERVPHRKVLDLDLNVPPPPEVA

SEQ ID NO: 57 - DNA, 633 bp, Populus balsamifera
  misc_feature 1..633: note = Ceres Annot ID no. 1455887
  misc_feature 1..633: note = Encodes the peptide sequence at SEQ ID NO. 58
  source 1..633: mol_type = unassigned DNA; note = Populus balsamifera subsp. trichocarpa
atggcacccaagaagcttaatggtaatgacaatggttctttgaagaaagcaagtggtgatcatgacaagaaggaaatccattataggggagtgaggaagaggccatgggggaggtatgctgctgagataagggatcccgggaagaaaagccgggtttggttgggcacgtttgacacggcagtggaggctgcgagggcctatgataaggcggcgcgtgagtatcgtggtgctaaggcgaagaccaactttccaatagcggagaaggtggttgattatgacgatgagaagcagagctctagccagagcagcaccgttgagtcgtcaagctccccggtggtttctgcggtggcgcgtgatgtaactcgccaggttggtggggttgtggggatggggaggtttccctttgtgttccagcagcagccgccgcatgttaacgctgttggtcctgtctggtttcttgatagtactgttaagcctgagtttgtggctcagcgtttccctgtccggtatgacccggtgggtcttgagggcggggcccatagtgactcggattcatcatctgtgattgattttaagccaaggagttcaattcttcatcttgatcttaacctgcctccaccagctgatgcttga

SEQ ID NO: 58 - protein, 210 aa, Populus balsamifera
  REGION 26..77: note = Pfam Name: AP2 Pfam Description: AP2 domain
  REGION 1..210: note = Ceres Annot ID no. 1455887
  REGION 1..210: note = Bit score of 253.2 for HMM based on sequences of Figure 4
  REGION 1..210: note = Functional Homolog Of SEQ ID NO. 1
  source 1..210: note = Populus balsamifera subsp. trichocarpa
MAPKKLNGNDNGSLKKASGDHDKKEIHYRGVRKRPWGRYAAEIRDPGKKSRVWLGTFDTAVEAARAYDKAAREYRGAKAKTNFPIAEKVVDYDDEKQSSSQSSTVESSSSPVVSAVARDVTRQVGGVVGMGRFPFVFQQQPPHVNAVGPVWFLDSTVKPEFVAQRFPVRYDPVGLEGGAHSDSDSSSVIDFKPRSSILHLDLNLPPPADA

SEQ ID NO: 59 - protein, 223 aa, Solanum tuberosum
  REGION 28..79: note = Pfam Name: AP2 Pfam Description: AP2 domain
  REGION 1..223: note = Public GI ID no. 118490009
  REGION 1..223: note = Bit score of 281.5 for HMM based on sequences of Figure 4
  REGION 1..223: note = Functional Homolog Of SEQ ID NO. 1
MAPKEKIGAVTAAAVMAVGKLNGISKEVHYRGVRKRPWGRYAAEIRDPGKKSRVWLGTFDTAEEAAKAYDNAAREFRGAKAKTNFPQLLKEEDLKFPVKNEINRSPSQTSTVESSSPVMVDSSSPLDLRLCGSIGGFNHNTVRFPISGGGFTGAVPAVNHMYYLDALERAGVINLETNRKKTVDFLGGGDSDTSTVIDFMRVDVKPTIAGLNLDLNFPPPENM

SEQ ID NO: 60 - DNA, 908 bp, Brassica napus
  misc_feature 1..908: note = Ceres Clone ID no. 1381515
  misc_feature 1..908: note = Encodes the peptide sequence at SEQ ID NO. 61
  source 1..908: mol_type = unassigned DNA
accttcaattatcacaccgtcccctctctccctctccggttattacgttatggccaagatgggtttgaaacccgacccggttactcctaacccgacccacaataatgccaaggagattcgttacagaggcgtgaggaagcgtccttggggccgttacgccgccgagatccgagatccgggtaagaaaacccgcgtctggcttggcaccttcgataccgcagaggaggcggcgcgtgcttacgataaggcggcgcgtgatttccgtggcgctaaggcgaagacgaattttcttgagctgaatgagaaggtgctctccggtggaggcggtttcgcgcggagccctagccagagcagcacccttgactacgcttctcctccggcggtgactgatgggattgttccacctcaacttgagctaagtcttggcggcggcggtggcgcgtgttaccagatcccaatggcgcgtcctctctactttttggaccttatgggggtcggaaacggaggtcgtggtcagcttccggtgtcgccggtgatgcatgtctctacgaagatggcttgtggtgcccagagcgactctgattcttcatcggtcgttgatttcgaaagtgggatggagaagagatctcagccgttagatttagatctaaacttgcttcctccggtggaacaggcctgaggtgttgccggtttcgcgcatgcgttttttgctttgcagctgagagaataatttcacgtagtttttttctccatcactctaaaataattattatcggtttttagaaattatataaatcgagggagaaaaagtataattcttagatgacatgtatcgttatgtacataaccggagatctgaacttttgttgtgtgcttttttgcgacttggttttcaccatgttgtttct

SEQ ID NO: 61 - protein, 209 aa, Brassica napus
  REGION 23..74: note = Pfam Name: AP2 Pfam Description: AP2 domain
  REGION 1..209: note = Ceres Clone ID no. 1381515
  REGION 1..209: note = Bit score of 239.1 for HMM based on sequences of Figure 4
  REGION 1..209: note = Functional Homolog Of SEQ ID NO. 1
MAKMGLKPDPVTPNPTHNNAKEIRYRGVRKRPWGRYAAEIRDPGKKTRVWLGTFDTAEEAARAYDKAARDFRGAKAKTNFLELNEKVLSGGGGFARSPSQSSTLDYASPPAVTDGIVPPQLELSLGGGGGACYQIPMARPLYFLDLMGVGNGGRGQLPVSPVMHVSTKMACGAQSDSDSSSVVDFESGMEKRSQPLDLDLNLLPPVEQA

SEQ ID NO: 62 - DNA, 845 bp, Arabidopsis thaliana
  misc_feature 1..845: note = Ceres Clone ID no. 22775
  misc_feature 1..845: note = Encodes the peptide sequence at SEQ ID NO. 63
  source 1..845: mol_type = unassigned DNA
ttcaattatctatcacaccaccactctctctctaatctatctatccgagaatggccaagatgggcttgaaacccgacccggctactactaaccagacccacaataatgccaaggagattcgttacagaggcgttaggaagcgtccttggggccgttatgccgccgagatccgagatccgggcaagaaaacccgcgtctggcttggcactttcgatacggctgaagaggcggcgcgtgcttacgatacggcggcgcgtgattttcgtggtgctaaggctaagaccaatttcccaacttttctcgagctgagtgaccagaaggtccctaccggtttcgcgcgtagccctagccagagcagcacgctcgactgtgcttctcctccgacgttagttgtgccttcagcgacggctgggaatgttcccccgcagctcgagcttagtctcggcggaggaggcggcggctcgtgttatcagatcccgatgtcgcgtcctgtctactttttggacctgatggggatcggtaacgtaggtcgtggtcagcctcctcctgtgacatcggcgtttagatcgccggtggtgcatgttgcgacgaagatggcttgtggtgcccaaagcgactctgattcgtcatcggtcgttgatttcgaaggtgggatggagaagagatctcagctgttagatctagatcttaatttgcctcctccatcggaacaggcctgagcttttaacggtgtcgtttcaattcgaagcgcatgcgtttcttcttctttttgagctgtgaaaattcgttttctcatagtttttcctctctctctctctcagtctaaatttattaccagtttttag

SEQ ID NO: 63 - protein, 222 aa, Arabidopsis thaliana
  REGION 23..74: note = Pfam Name: AP2 Pfam Description: AP2 domain
  REGION 1..222: note = Ceres Clone ID no. 22775
  REGION 1..222: note = Bit score of 275.2 for HMM based on sequences of Figure 4
  REGION 1..222: note = Functional Homolog Of SEQ ID NO. 1
MAKMGLKPDPATTNQTHNNAKEIRYRGVRKRPWGRYAAEIRDPGKKTRVWLGTFDTAEEAARAYDTAARDFRGAKAKTNFPTFLELSDQKVPTGFARSPSQSSTLDCASPPTLVVPSATAGNVPPQLELSLGGGGGGSCYQIPMSRPVYFLDLMGIGNVGRGQPPPVTSAFRSPVVHVATKMACGAQSDSDSSSVVDFEGGMEKRSQLLDLDLNLPPPSEQA

SEQ ID NO: 64 - protein, 211 aa, Capsicum annuum
  REGION 23..74: note = Pfam Name: AP2 Pfam Description: AP2 domain
  REGION 1..211: note = Public GI ID no. 60459377
  REGION 1..211: note = Bit score of 375.5 for HMM based on sequences of Figure 4
  REGION 1..211: note = Functional Homolog Of SEQ ID NO. 1
MALKSKVSSNGSENAKVNGVKEVHYRGVRKRPWGRYAAEIRDPGKKSRVWLGTFDTAEEAAKAYDAAARDFRGPKAKTNFPSPFPLETLNQSPSNSSTLESSSGETGVHAPMEVDLTRRLGAVAPVFHQQPTVAVLPNGQPVLLFDSLWRPGVVVDKAQLSYQVAPMAIEFTGAAGGVSSVSDSSSVVEENQYVGKKGLDLDLNLAPPMEI

SEQ ID NO: 65 - DNA, 648 bp, Populus balsamifera
  misc_feature 1..648: note = Ceres Annot ID no. 1488231
  misc_feature 1..648: note = Encodes the peptide sequence at SEQ ID NO. 66
  source 1..648: mol_type = unassigned DNA; note = Populus balsamifera subsp. trichocarpa
atggcacccaagaagcttaatgccagcaacagtggctgtttcaagaaagcaagtggggatcatgacaagaaagagatacattacaggggagtgaggaagaggccgtgggggaggtatgctgctgagataagggatcccgggaagaaaagccgggtttggctgggtacttttgatacggcggaggaggctgctaaagcctatgataaagcggcgcgtgagtatcggggtgctaaggcgaagaccaactttcctttttccggggaggtggttaattatgacgatgacaagcagagttctagccatagcagcaccgtggagtcgtcgagctctccggttgtttctgctgcggtgacccgccaggttggtggtggtggagtgggcggggttgtggggatgggagggtttccttttgtgtaccagcagcagcagcagcagcagaatgttaacgttgttgctcctgtctggttttttgatagtgtgaggcctgagtttgtgactcagcgattccctgtccggtttgaccaggtgggtcttgagagtgctggtggggcccagagtgactcggattcatcatctatggttgattgtcagccacggagatcagttcttgatcttgatcttaacctgcctccaccgctggatgcttga

SEQ ID NO: 66 - protein, 215 aa, Populus balsamifera
  REGION 26..77: note = Pfam Name: AP2 Pfam Description: AP2 domain
  REGION 1..215: note = Ceres Annot ID no. 1488231
  REGION 1..215: note = Bit score of 250.5 for HMM based on sequences of Figure 4
  REGION 1..215: note = Functional Homolog Of SEQ ID NO. 1
  source 1..215: note = Populus balsamifera subsp. trichocarpa
MAPKKLNASNSGCFKKASGDHDKKEIHYRGVRKRPWGRYAAEIRDPGKKSRVWLGTFDTAEEAAKAYDKAAREYRGAKAKTNFPFSGEVVNYDDDKQSSSHSSTVESSSSPVVSAAVTRQVGGGGVGGVVGMGGFPFVYQQQQQQQNVNVVAPVWFFDSVRPEFVTQRFPVRFDQVGLESAGGAQSDSDSSSMVDCQPRRSVLDLDLNLPPPLDA

SEQ ID NO: 67 - DNA, 1024 bp, Gossypium hirsutum
  misc_feature 1..1024: note = Ceres Clone ID no. 1884969
  misc_feature 1..1024: note = Encodes the peptide sequence at SEQ ID NO. 68
  source 1..1024: mol_type = unassigned DNA
aaaccaaaatatttacaaccctgagagagaaaaaaagggaaagaaaagtttttatggctccccaagacaaaaatgcgagcaaaatcttgaagaaagctaacgttactggaagtacgagcagccaagaggtgcatttcaggggagtaaggaagaggccatggggtaggtacgctgccgaaatcagagatcccggaaagaaaagccgtgtttggcttggtactttcgatacggctgaggaagctgccagagcctacgacgcggcggcgcgtgagtttcgtggacctaaggctaagaccaacttccctttaccggatgaaaccaactgttacaagggccagaaccagcagagccctagccaaagcagcacggtagaggaatctggaagcccaacggtggagcgtggagtcaacactgtgaccggggcagtagggagattccctttcgcgtgccaccagcagctggctctgggtggtggagtcgctaatggtgggattagcggggtgacccagtcgcggccggttctatttatcgaagcgttgggaggagctggcgttgttggtcaggtttatccggttcggttcgatccggtgggagtgcagttgggtatgggatttgcaagtgttgtccgaagtgaaccggactcttcatcggccattcattgcaaggcaaggagacctggccttgtcctcgatcttaaccttcctcctccagtcgatgcttgatgttttgcattttttttttctttttttcttttttttttacgggaaacgccctttcatcatcttaatttaagacatctgagaggtaggaagctatgataaacaagaggtgatagtaatccgtattttgtatcattttagacatgattttatccttaaatcctatgtaaatagttttacgatagtaatccgtgtttgcaaactgagaggaaaactatgatccattatcttagatgattttgtttataacctctcgttcaaaattaaccattcttttttactttcaatgagaatctttcttattt

SEQ ID NO: 68 - protein, 222 aa, Gossypium hirsutum
  REGION 26..77: note = Pfam Name: AP2 Pfam Description: AP2 domain
  REGION 1..222: note = Ceres Clone ID no. 1884969
  REGION 1..222: note = Bit score of 260.6 for HMM based on sequences of Figure 4
  REGION 1..222: note = Functional Homolog Of SEQ ID NO. 1
MAPQDKNASKILKKANVTGSTSSQEVHFRGVRKRPWGRYAAEIRDPGKKSRVWLGTFDTAEEAARAYDAAAREFRGPKAKTNFPLPDETNCYKGQNQQSPSQSSTVEESGSPTVERGVNTVTGAVGRFPFACHQQLALGGGVANGGISGVTQSRPVLFIEALGGAGVVGQVYPVRFDPVGVQLGMGFASVVRSEPDSSSAIHCKARRPGLVLDLNLPPPVDA

SEQ ID NO: 69 - DNA, 961 bp, Panicum virgatum
  misc_feature 1..961: note = Ceres Clone ID no. 1802100
  misc_feature 1..961: note = Encodes the peptide sequence at SEQ ID NO. 70
  source 1..961: mol_type = unassigned DNA
aatccatcctctcctcgcgagctccaacagcaatcaagctagagagaagcttaggctgcaagaagaagccagcaagaggcgaggacgcgagcagggcaagcgagatcactcggaccaagcgatccatggcgccgaggaggtcgacttcgccggccgggagcggcagcagcggcggcggcggcggcgcggagcagccgaggctgcgcggcgtgcggaagcggccgtggggccggtacgcggcggagatccgcgaccccgtgcggaaggcgcgcgtgtggctggggaccttcgacacgcccgaggaggcggcgcgcgcctacgacgccgccgcgcgcaggctccgcgggccgcgcgcagccaccaactaccccgcccacgcccaggacccgaaggcggcggccgcggcgattccggcgtcgagcgctagcgcgagcgggagcggggtgctgtcgtcggaggacgcgtcgtcgtcgtcctcctgccgggactcgccgctggcgcccccgtcgctggacctgagcctggcgctcccggccgtggcggccgcgccgccgccgtattcgtaccagcagctgttcctggacccggcggcgatggtggccgcggcgccggcgctgctgcagttcctgccgcccaagagtgaggaagaacagagctgctcagggtcgagctcctcctcgtcggtggtggtcgacgcggcgccggcggtgggcctggggctggacctgaacctggcgctcgcggccgggatggtgatgtagagacaagaccaatgatttggttaattagtggctcctagctcaccgatccagatgttcacccggtgtaaatagtcggcccgcagggatttatttgtgcatctgcgcagccagttctctttgcttcctttttgtacccacagatttcgcgtcccgcaaagatgcgcgccaacgcaagaaggaagaaactttgccccagccac

SEQ ID NO: 70 - protein, 211 aa, Panicum virgatum
  REGION 24..75: note = Pfam Name: AP2 Pfam Description: AP2 domain
  REGION 1..211: note = Ceres Clone ID no. 1802100
  REGION 1..211: note = Bit score of 122.3 for HMM based on sequences of Figure 4
  REGION 1..211: note = Functional Homolog Of SEQ ID NO. 1
MAPRRSTSPAGSGSSGGGGGAEQPRLRGVRKRPWGRYAAEIRDPVRKARVWLGTFDTPEEAARAYDAAARRLRGPRAATNYPAHAQDPKAAAAAIPASSASASGSGVLSSEDASSSSSCRDSPLAPPSLDLSLALPAVAAAPPPYSYQQLFLDPAAMVAAAPALLQFLPPKSEEEQSCSGSSSSSSVVVDAAPAVGLGLDLNLALAAGMVM

SEQ ID NO: 71 - protein, 222 aa, Gossypium barbadense
  REGION 26..77: note = Pfam Name: AP2 Pfam Description: AP2 domain
  REGION 1..222: note = Public GI ID no. 156145802
  REGION 1..222: note = Bit score of 261.7 for HMM based on sequences of Figure 4
  REGION 1..222: note = Functional Homolog Of SEQ ID NO. 1
MAPQDKNASKTLKKANGTGSTSSQEVHFRGVRKRPWGRYAAEIRDPGKKSRVWLGTFDTAEEAAKAYDAAAREFRGPKAKTNFPLPDETNCYKGQNQQSPSQSSTVEESGSPTVERGVNTLSGAVGRFPFACHQQLALGGGVANGGISGVTRSRPVLFFEALGGAGVVGQVYPVRFDPVGVQLGMGFASVVRSEPDSSSAIHCKARRPGLALDLNLPPPVDA

SEQ ID NO: 72 - protein, 222 aa, Solanum lycopersicum
  REGION 25..76: note = Pfam Name: AP2 Pfam Description: AP2 domain
  REGION 1..222: note = Public GI ID no. 28274832
  REGION 1..222: note = Bit score of 272.3 for HMM based on sequences of Figure 4
  REGION 1..222: note = Functional Homolog Of SEQ ID NO. 1
MAPKEKIGAVTAMAMVNLNGISKEVHYRGVRKRPWGRYAAEIRDPGKKSRVWLGTFDTAEEAARAYDNAAREFRGAKAKTNFPKLEMEKEEDLKFAVKNEINRSPGQTSTVESSSPVMVDSSSPLDLSLCGSIGGFNHHTVKFPSSGGGFTGSVQAVNRMYYIEALARAGVIKLEQIGRKRLDYLGGGDSDSSTVIDFMRVDVKSTTAGLNLDLNFPPPENM

SEQ ID NO: 73 - DNA, 1126 bp, Triticum aestivum
  misc_feature 1..1126: note = Ceres Clone ID no. 568399
  misc_feature 1..1126: note = Encodes the peptide sequence at SEQ ID NO. 74
  source 1..1126: mol_type = unassigned DNA
ccccccagctccaaccagccagaccatccaaccaacgccgcaccgcaacaacaaccgccgcgcacgcgccgagcacggtcgaacacttgccatggctcccaagaacgcgctccccgtcgccgtcgccgccgccgcggacgccggcatggagcccaggttccgcggcgtgcgcaagcggccgtggggcaggtacgcggcggagatccgcgacccggccaggaaggcccgcgtctggctcggcaccttcgacaccgccgaggccgcggcccgcgcctacgacgccgccgcgctccactaccgcgggcccaaggccaagaccaacttccccgtcggcaccgtcgccgccttcgcccacgtcccgctcccgccgcccaaggcgctggccgtcagccccagcagcagcaccgtcgagtcttcgtcccgggacacgccggccgcggcgcccgccgctcctgctgctgctgcccccgcgcccccgccggcgctcgacctgagcctggcgatgccggccatggtggcggcgcagccgttcctgttcctggaccccagggtcgcggtgaccgtggccgtggccgcgccggcgccggccccctgccggtcagcggcgatcagcggcatgaacaaggtggcgtcccgcgaggaagagcagagcgacaccgggtcgtcgtcatccgtggtggacgcctcgccggccgtgggcgtggggttcgacctgaacctgccgccgccggtggagatggcgtaggagatggaccgatctcggtcgcccgatgacgacgcggcccggaagtaaagcaaagcgctctcgtggtagaatttaaagtttagaagaatggcgtgtacttactagtaagaggttaatcggccgtttaattgccaggatcgatccatcgatgggtaagggtaagtaggtgtacatagatcgcgtgcgtgcgttttttgcatggggaggcaggtaggatgaaacacatccatctatctgctcccaatgttacttacaatttccttaaaagcaagggaaaaaaagacaaaaaggaagaagccagtagtagagcattttgttcttcagtgtacaatatttgatctctgtctctcggattaatgtgaaatttatgatttccattcc

SEQ ID NO: 74 - protein, 217 aa, Triticum aestivum
  REGION 21..72: note = Pfam Name: AP2 Pfam Description: AP2 domain
  REGION 1..217: note = Ceres Clone ID no. 568399
  REGION 1..217: note = Bit score of 188.5 for HMM based on sequences of Figure 4
  REGION 1..217: note = Functional Homolog Of SEQ ID NO. 1
MAPKNALPVAVAAAADAGMEPRFRGVRKRPWGRYAAEIRDPARKARVWLGTFDTAEAAARAYDAAALHYRGPKAKTNFPVGTVAAFAHVPLPPPKALAVSPSSSTVESSSRDTPAAAPAAPAAAAPAPPPALDLSLAMPAMVAAQPFLFLDPRVAVTVAVAAPAPAPCRSAAISGMNKVASREEEQSDTGSSSSVVDASPAVGVGFDLNLPPPVEMA

SEQ ID NO: 75 - protein, 222 aa, Oryza sativa
  REGION 24..75: note = Pfam Name: AP2 Pfam Description: AP2 domain
  REGION 1..222: note = Public GI ID no. 115460458
  REGION 1..222: note = Bit score of 183.4 for HMM based on sequences of Figure 4
  REGION 1..222: note = Functional Homolog Of SEQ ID NO. 1
  source 1..222: note = Oryza sativa subsp. japonica
MAPRNAAEAVAVAVAEGGGAGMEPRFRGVRKRPWGRYAAEIRDPARKARVWLGTFDTAEAAARAYDSAALHFRGPKAKTNFPVAFAHAHHHAPPPPLPKAAALAVVSPTSSTVESSSRDTPAAAPVAAAAKAQVPASPSLDLSLGMSAMVAAQPFLFLDPRVAVTVAVAAPVPRRPAVVSVKKEVARLDEQSDTGSSSSVVDASPAVGVGLDLNLPPPIEEA

SEQ ID NO: 76 - DNA, 561 bp, Arabidopsis thaliana
  misc_feature 1..561: note = Ceres Clone ID no. 4831
  misc_feature 1..561: note = Encodes the peptide sequence at SEQ ID NO. 77
  source 1..561: mol_type = unassigned DNA
gctctagtttcccccaacaatcgccatggcagcttcgtctctcaatctcctcctcattctctctcttctcactttcatttctctccagagatctgaatctctttccgataatccatctctcactcttctacccgacggattcgactggccgatctctcactccgatgaattcgatatcatcgacggtgaagaaagcttcgaagttacggaggaagacgacggcgtaacagatcgacggtcattgtactggcggaggacgaagtattacatatcgtacggtgcattgtcggcgaatagagtgccatgtcctcccagatctggaagatcgtactacactcataactgcttcagagctagaggtcccgttcatccgtatagcctaggctgctcgtcgatcactcccggagatagatgaagaaagcttaaaactccatgggcattttcgtaattttgccaaccatggtttattattatgatgtttgtatttgtaatgttcgatgtttgtttgtaaaccgtgattagttacgttcgttaaacggtaaacccgatgattataatttc

SEQ ID NO: 77 - protein, 129 aa, Arabidopsis thaliana
  REGION 57..129: note = Pfam Name: RALF Pfam Description: Rapid ALkalinization Factor (RALF)
  REGION 1..129: note = Ceres Clone ID no. 4831
  REGION 1..129: note = Bit score of 330.2 for HMM based on sequences of Figure 9
MAASSLNLLLILSLLTFISLQRSESLSDNPSLTLLPDGFDWPISHSDEFDIIDGEESFEVTEEDDGVTDRRSLYWRRTKYYISYGALSANRVPCPPRSGRSYYTHNCFRARGPVHPYSLGCSSITPGDR

SEQ ID NO: 78 - DNA, 666 bp, Brassica napus
  misc_feature 1..666: note = Ceres Clone ID no. 1387948
  misc_feature 1..666: note = Encodes the peptide sequence at SEQ ID NO. 79
  source 1..666: mol_type = unassigned DNA
gcatgtgagttgctaattactactctcttcttctattattaactttcttcctcttcttcttcttcgcttccctctccagcatcgccatggcagctgctccgcctcttactctcctcatcgctctctctcttctcttcatttcactccagagatctgaatctctccccgagaatccatccatgattcttctaggcgacggattcgactggccgatctctcacggcgacgcattagacatcgacggaggagaaagctttgaagatgcggaggaggaagatgtcgcggatcgacggtcattgtactggaagaggaggagatactacatctcttacggcgcattgtcggcgaacagagtcccgtgtcctcccagatctggaagatcgtactacactcacaactgcttcagagctagaggtcaggtgcatccctacagtcgaggctgctcctccatcactcggtgccggagatagaagaaaccacgggggcattctcgtaattttccaatcacggactctgtttgtagttctcgttcgatttcgatgtgttgtgtagtaaaccgtgattagttacgtttgtttaaattaattaagcccgcggtattattattattcgagtgatatctatatgtattcaactttgtggtaattgttatttattttgtcggtg

SEQ ID NO: 79 - protein, 127 aa, Brassica napus
  REGION 55..127: note = Pfam Name: RALF Pfam Description: Rapid ALkalinization Factor (RALF)
  REGION 1..127: note = Ceres Clone ID no. 1387948
  REGION 1..127: note = Bit score of 307.4 for HMM based on sequences of Figure 9
  REGION 1..127: note = Functional Homolog Of SEQ ID NO. 77
MAAAPPLTLLIALSLLFISLQRSESLPENPSMILLGDGFDWPISHGDALDIDGGESFEDAEEEDVADRRSLYWKRRRYYISYGALSANRVPCPPRSGRSYYTHNCFRARGQVHPYSRGCSSITRCRR

SEQ ID NO: 80 - DNA, 898 bp, Gossypium hirsutum
  misc_feature 1..898: note = Ceres Clone ID no. 1937714
  misc_feature 1..898: note = Encodes the peptide sequence at SEQ ID NO. 81
  source 1..898: mol_type = unassigned DNA
ccttcacctctgcaacttgttagctgtttaccaacaatggcttcttcttcggttctcagcaagcttcttttgccccttttcctcactcacattgccgtctcgatctcgaaaaccgaagctcaagttgaagacacaaggttgaagctggtgagagatgctttcgaatggccactttcaatgtcgtttcagggtgacttacacgacaatgaagaaggcgatgaggaggtagatgatgaagttgaaaatgggtatagtggtagatctttgttgtggtggaagagaatgaggtattacatttcgtatggggcgctttcggctaacagaatcccatgtccaccaaggtcaggcaggtcttattatactcacaactgtttcaaggctcatggccctgttcatccttataccaggggatgttccaggatcactcgctgcaggagatgaggttttaaatttagccctttttagaatctgggtttgtattagttaatcattattttgcgaaatgtggaagatttgagtgttttgggatttggggcttctttttgcccttcgtttagtatttgaagagcatcatgtgtcataaggttaaactactttatgattatggtagtttttattatatgtatagttttggtctggaagggcgggggtgttcattggcagtcgctattttatatcatatatgtgatctcatcaacttacctgtaaatgcttgaagacctgaatcctgctgttgcgtgctgcaacaaacgccgcagcttgaaaaggtgaactagtcaccaaaattttccgccttaattttaaataattattaaataattcgataatttttattatttaaaatcgttgttatatatttttctttgtcaccatttgtattaatcaaaagtttttaccc

SEQ ID NO: 81 - protein, 134 aa, Gossypium hirsutum
  REGION 58..134: note = Pfam Name: RALF Pfam Description: Rapid ALkalinization Factor (RALF)
  REGION 1..134: note = Ceres Clone ID no. 1937714
  REGION 1..134: note = Bit score of 363.8 for HMM based on sequences of Figure 9
  REGION 1..134: note = Functional Homolog Of SEQ ID NO. 77
MASSSVLSKLLLPLFLTHIAVSISKTEAQVEDTRLKLVRDAFEWPLSMSFQGDLHDNEEGDEEVDDEVENGYSGRSLLWWKRMRYYISYGALSANRIPCPPRSGRSYYTHNCFKAHGPVHPYTRGCSRITRCRR

SEQ ID NO: 82 - protein, 125 aa, Vitis vinifera
  REGION 53..125: note = Pfam Name: RALF Pfam Description: Rapid ALkalinization Factor (RALF)
  REGION 1..125: note = Public GI ID no. 157345132
  REGION 1..125: note = Bit score of 344.6 for HMM based on sequences of Figure 9
  REGION 1..125: note = Functional Homolog Of SEQ ID NO. 77
MACSSLPKLLVLCAFFVYISNVVVVAQVDESSLKLITDSLEWPSTMSLYNEFGDEDGEDPDGVIDRRSMFWHRMRYYISYGALSANRIPCPPRSGRSYYTHNCFQARGPVRPYTRGCSTITRCRR

SEQ ID NO: 83 - DNA, 696 bp, Glycine max
  misc_feature 1..696: note = Ceres Clone ID no. 464828
  misc_feature 1..696: note = Encodes the peptide sequence at SEQ ID NO. 84
  source 1..696: mol_type = unassigned DNA
gatggcttctcttctcaccctcgctctgttactcttctgcattgcctttacctcccacgttgccgtgcaggcgcacatggaggacacggccttcaacctcatgtcggacgccttggagtggcccaccacaatgtcgctctacgacgaagacgacgcccaagaggatgtcgagaacgcttacagtcggagatcgttgttctggcggcggatgaagtactacatctcctacggtgctctttctgctaaccgaattccttgcccgcctcgttctggtagatcttactacacccacaactgctacagggcacgaggccccgttcacccttactccagaggatgctctgccatcacgcgctgccggagatgagtttgatgtgagttccgatctgatcacacgcttcagatcggagatggaaataaaaaaaccgagtaccgtttatggtggttttgttttgttttgttttattggtgtactagatttatattgtggatttaaggcgtcgttagttgtgctaagcaagtcaagtcaagtgaaagtgtcgtgtttgagttaacggtttttggggattcttcacttgcatcgactcgttgcgctgcgcaaatgaatctgcttgctttttgtgttacttcgtcatttattcgtttgtataaacccaacggtttctttttcttggtgttcagagcactttcagtttc

SEQ ID NO: 84 - protein, 121 aa, Glycine max
  REGION 49..121: note = Pfam Name: RALF Pfam Description: Rapid ALkalinization Factor (RALF)
  REGION 1..121: note = Ceres Clone ID no. 464828
  REGION 1..121: note = Bit score of 319.9 for HMM based on sequences of Figure 9
  REGION 1..121: note = Functional Homolog Of SEQ ID NO. 77
MASLLTLALLLFCIAFTSHVAVQAHMEDTAFNLMSDALEWPTTMSLYDEDDAQEDVENAYSRRSLFWRRMKYYISYGALSANRIPCPPRSGRSYYTHNCYRARGPVHPYSRGCSAITRCRR

SEQ ID NO: 85 - DNA, 405 bp, Populus balsamifera
  misc_feature 1..405: note = Ceres Annot ID no. 1451368
  misc_feature 1..405: note = Encodes the peptide sequence at SEQ ID NO. 86
  source 1..405: mol_type = unassigned DNA; note = Populus balsamifera subsp. trichocarpa
atggcagcttctacattgcaataccatttcgccttcttcatcttctttctcgtaattgcttctttcagtccaagaatccaagctcaagttgatgaaacaagcttgaaggcaatgagagatgcactagaatggccaatgtccatgtattatgatgaaagcagcggtctcaatgatgggttagtgggttttgacgatggagttgttgacgatgaagaaagtagtcgtagatctttgttttggaggagaacgcattattatatctcgtatggagctttgtctgctaatagaattccttgtccagcgaggtccgggcgatcctactacagccacaattgcttcgcgtctagagctccagtgaatccctattccagagggtgttctaggatcgctcgttgcaggagatga

SEQ ID NO: 86 - protein, 134 aa, Populus balsamifera
  REGION 62..134: note = Pfam Name: RALF Pfam Description: Rapid ALkalinization Factor (RALF)
  REGION 1..134: note = Ceres Annot ID no. 1451368
  REGION 1..134: note = Bit score of 340.5 for HMM based on sequences of Figure 9
  REGION 1..134: note = Functional Homolog Of SEQ ID NO. 77
  source 1..134: note = Populus balsamifera subsp. trichocarpa
MAASTLQYHFAFFIFFLVIASFSPRIQAQVDETSLKAMRDALEWPMSMYYDESSGLNDGLVGFDDGVVDDEESSRRSLFWRRTHYYISYGALSANRIPCPARSGRSYYSHNCFASRAPVNPYSRGCSRIARCRR

SEQ ID NO: 87 - protein, 123 aa, Solanum chacoense
  REGION 52..123: note = Pfam Name: RALF Pfam Description: Rapid ALkalinization Factor (RALF)
  REGION 1..123: note = Public GI ID no. 37695575
  REGION 1..123: note = Bit score of 304.5 for HMM based on sequences of Figure 9
  REGION 1..123: note = Functional Homolog Of SEQ ID NO. 77
MESPILFFLIIFLFTITNNAIVIEAQVDKFGLEQLVSEDFELPMAMSSLYEETEDDEMQLDGNGRSLLWHKFKYYISYGALSANRIPCPPRSGRSYYTHHCYHATGPAHPYTRGCSAITRCRR

SEQ ID NO: 88 - protein, 100 aa, Picea sitchensis
  REGION 31..97: note = Pfam Name: RALF Pfam Description: Rapid ALkalinization Factor (RALF)
  REGION 1..100: note = Public GI ID no. 116790033
  REGION 1..100: note = Bit score of 213.1 for HMM based on sequences of Figure 9
  REGION 1..100: note = Functional Homolog Of SEQ ID NO. 77
MDGLITRSNPPPQPKCAMMEAWGECGANVDEENENEVGHGRLLRRIRYYISYGALAANRIPCPPRSGRSYYTRNCYRATEPVRPYHRSCTAITRCLRDTS

SEQ ID NO: 89 - DNA, 716 bp, Arabidopsis thaliana
  misc_feature 1..716: note = Ceres Clone ID no. 1346042
  misc_feature 1..716: note = Encodes the peptide sequence at SEQ ID NO. 90
  source 1..716: mol_type = unassigned DNA
aattagaacccccaaaatctcttcacaactgtaaaaccccaatcacctctttacatgtgacttccttattactctcttcttcttattttcctcctcttcttcttcgctctagtttcccccaacaatcgccatggcagcttcgtctctcaatctcctcctcattctctctcttctcactttcatttctctccagagatctgaatctctttccgataatccatctctcactcttctacccgacggattcgactggccgatctctcactccgatgaattcgatatcatcgacggtgaagaaagcttcgaagttacggaggaagacgacggcgtaacagatcgacggtcattgtactggcggaggacgaagtattacatatcgtacggtgcattgtcggcgaatagagtgccatgtcctcccagatctggaagatcgtactacactcataactgcttcagagctagaggtcccgttcatccgtatagccgaggctgctcgtcgatcactcgatgccggagatagatgaagaaagcttaaaactccatgggcattttcgtaattttgccaaccatggtttattattatgatgtttgtatttgtaatgttcgatgtttgtttgtaaaccgtgattagttacgttcgttaaacggtaaacccgatgattataatttcgagttctgctatagaaatggttaagtactaaagagtcgtgaggggt

SEQ ID NO: 90 - protein, 129 aa, Arabidopsis thaliana
  REGION 57..129: note = Pfam Name: RALF Pfam Description: Rapid ALkalinization Factor (RALF)
  REGION 1..129: note = Ceres Clone ID no. 1346042
  REGION 1..129: note = Bit score of 340.8 for HMM based on sequences of Figure 9
  REGION 1..129: note = Functional Homolog Of SEQ ID NO. 77
MAASSLNLLLILSLLTFISLQRSESLSDNPSLTLLPDGFDWPISHSDEFDIIDGEESFEVTEEDDGVTDRRSLYWRRTKYYISYGALSANRVPCPPRSGRSYYTHNCFRARGPVHPYSRGCSSITRCRR

SEQ ID NO: 91 - DNA, 491 bp, Brassica napus
  misc_feature 1..491: note = Ceres Clone ID no. 1118610
  misc_feature 1..491: note = Encodes the peptide sequence at SEQ ID NO. 92
  source 1..491: mol_type = unassigned DNA
aacttyctcttcttcttcttcgttttcgcctccaccatcaccatggcagcagctccgtctcttactctattcatcactctctcccttctcttcatttcactccagagatctgaatctctcccccagaatccatccatgattcttctaggcgacggattcgactggccgatctctcacggcgacgcattcgacatcgacggaggagaaagctttgaagatgtcgcggatcgacggtcattgtactggaagaggaggagatactacatctcttacggtgcattgtcggcgaacagagtaccgtgtcctcccagatctggaagatcgtactacactcacaactgcttcagagctagaggtccggtgcatccttacagccgaggctgctcctccatcactcggtgccggagatagaagaaaccaagggcattctcgtaattttccaatcacggactctgtttgtagttctcgttcgatttcgatgtattgtgtag

SEQ ID NO: 92 - protein, 122 aa, Brassica napus
  REGION 50..122: note = Pfam Name: RALF Pfam Description: Rapid ALkalinization Factor (RALF)
  REGION 1..122: note = Ceres Clone ID no. 1118610
  REGION 1..122: note = Bit score of 282.1 for HMM based on sequences of Figure 9
  REGION 1..122: note = Functional Homolog Of SEQ ID NO. 77
MAAAPSLTLFITLSLLFISLQRSESLPQNPSMILLGDGFDWPISHGDAFDIDGGESFEDVADRRSLYWKRRRYYISYGALSANRVPCPPRSGRSYYTHNCFRARGPVHPYSRGCSSITRCRR

SEQ ID NO: 93 - DNA, 496 bp, Brassica napus
  misc_feature 1..496: note = Ceres Clone ID no. 982000
  misc_feature 1..496: note = Encodes the peptide sequence at SEQ ID NO. 94
  source 1..496: mol_type = unassigned DNA
ataaatggcgcattagttaaaacctcaagtcacctcttggcatgtgacttactagttcctctactctcttccattattattttccttcttctttgctttcgtctcaagcatatcaccatggcagcagctccgtctcttaacctcctcctcatcattctctctcttctcctcgtttcactcccaagatccgaatctctccccgagaatccatccctgattcttctaggcgagggattcgactggccgatctctgatggcggcattggcggaggagaaagcttcgaagacgcggaggaggaagaggacaacgtcggtgttgtagatcgacggtcattgtactggcacaggaagagatattacatatcgtacggtgcattgtcggcgaacagagtcccgtgtcctcccagatctggaagatcgtactacactcacaactgcttcagagctagaggtcccgtgcatccctacagtcgaggctgctcgtccatcactcgat

SEQ ID NO: 94 - protein, 126 aa, Brassica napus
  REGION 57..126: note = Pfam Name: RALF Pfam Description: Rapid ALkalinization Factor (RALF)
  REGION 1..126: note = Ceres Clone ID no. 982000
  REGION 1..126: note = Bit score of 255.0 for HMM based on sequences of Figure 9
  REGION 1..126: note = Functional Homolog Of SEQ ID NO. 77
MAAAPSLNLLLIILSLLLVSLPRSESLPENPSLILLGEGFDWPISDGGIGGGESFEDAEEEEDNVGVVDRRSLYWHRKRYYISYGALSANRVPCPPRSGRSYYTHNCFRARGPVHPYSRGCSSITR

SEQ ID NO: 95 - DNA, 567 bp, Brassica napus
  misc_feature 1..567: note = Ceres Clone ID no. 959670
  misc_feature 1..567: note = Encodes the peptide sequence at SEQ ID NO. 96
  source 1..567: mol_type = unassigned DNA
attgtctcacacactcgaaaactctcacacgaaggtcgaaaggtccataaatggcgcattagttaaaacctcaaaccacctcttcgcatgtgacttgctagttgctctactctcttccattattattttccttcttctttgcttgagtctcaagcatatcgccatggcagcagctccgtctcttaacctcctcatcatcacactatttcttctcatcatttcactcccaagatctgaatctctccccgagaatccatccctgcttgttctaggcgacggattcgactggccgatctctgatggcggcattggcggaggagaaagcttcgaagacgcggaggaggaagaggacaacgtcggtgtcggagatcgacggtcattgtactggcacaggaagagatactacatatcgtacggtgcattgtcggcgaacagagtcccgtgtcctcccagatctggaagatcgtactacactcacaactgcytcagagctagaggtccggtgcatccctacactcgaggctgstcgtccatcactcgatgccggagataactaggagaaaagac

SEQ ID NO: 96 - protein, 129 aa, Brassica napus
  REGION 57..129: note = Pfam Name: RALF Pfam Description: Rapid ALkalinization Factor (RALF)
  REGION 1..129: note = Ceres Clone ID no. 959670
  REGION 1..129: note = Bit score of 267.2 for HMM based on sequences of Figure 9
  REGION 1..129: note = Functional Homolog Of SEQ ID NO. 77
  UNSURE 108: note = X is any aa, unknown, or other
  UNSURE 121: note = X is any aa, unknown, or other
MAAAPSLNLLIITLFLLIISLPRSESLPENPSLLVLGDGFDWPISDGGIGGGESFEDAEEEEDNVGVGDRRSLYWHRKRYYISYGALSANRVPCPPRSGRSYYTHNCXRARGPVHPYTRGXSSITRCRR

SEQ ID NO: 97 - DNA, 422 bp, Brassica napus
  misc_feature 1..422: note = Ceres Clone ID no. 952522
  misc_feature 1..422: note = Encodes the peptide sequence at SEQ ID NO. 98
  source 1..422: mol_type = unassigned DNA
gtgtgtgtgtgtgtgacctgctgctctcttcttactcgctttcttctccagcattgccatggaagctccgtctcttactcttaacctcctcctccttatcattgtctctcttctcttcatttcactcccgagatctgaacctctcccggaaaacccatccttggttcttcttggcgacggattcgaatggccgacctctcacgtcgacgcattcgacatagaaagctttgacgatgcgggggaggaggaagacgacgacgtcggtgtatcagatcgacggtcgttgtactggaaaaggaggagatactacatctcctacggtgcattgtcggcgaacagagtcccctgtcctccgagatctggaaggtcttactacactcacaactgctttagagctagaggtccagttcatacctacactc

SEQ ID NO: 98 - protein, 121 aa, Brassica napus
  REGION 60..121: note = Pfam Name: RALF Pfam Description: Rapid ALkalinization Factor (RALF)
  REGION 1..121: note = Ceres Clone ID no. 952522
  REGION 1..121: note = Bit score of 213.6 for HMM based on sequences of Figure 9
  REGION 1..121: note = Functional Homolog Of SEQ ID NO. 77
MEAPSLTLNLLLLIIVSLLFISLPRSEPLPENPSLVLLGDGFEWPTSHVDAFDIESFDDAGEEEDDDVGVSDRRSLYWKRRRYYISYGALSANRVPCPPRSGRSYYTHNCFRARGPVHTYT

SEQ ID NO: 99 - DNA, 888 bp, Gossypium hirsutum
  misc_feature 1..888: note = Ceres Clone ID no. 1914539
  misc_feature 1..888: note = Encodes the peptide sequence at SEQ ID NO. 100
  source 1..888: mol_type = unassigned DNA
acaaacatcacaaaatcaacggcaaaagccaatctaaaaccatggaatgctaccacacagaacacgatcaattccatttgattggctcaagaaccgaagcacgcggtaatggagggcatcgattgaaagcacagctgtaaatcaatcatctctgtgctgattgtgaccccatctgtccccttaaaccgaaccccaaaacgaaaaccacttcaattattctcttcttcatccaaaactctccttgcaagcaacttgttactgacaatggcttcttcttcacttctcagcaagctccttttgctccttttcatctcttacattgtgttgtggggatcgaaagtggatgcccaagttgaagagacaagcttgaagctgatgagagatgctttggaatggccgctttctgtgtcactttacagtgacttaaacgacaatgaaggtgaagaagaggtagatggtgaagaggaaactgggcatagtcgtagatccttgttttggacgagaatgaggtattacatttcgtactcggcgctttctgctaatagaatcccatgtcccccaagatcaggaaggtcttattataccaacaactgtttcaaggcacatggatcagtccacccttactctagaggatgctccaggattacccgctgcaggagatgagtttttcttttttctttttctttttagtggatgctttgggtttgtaatattttaatgtgtattttgtgagaactatggaggaattgagtgttgaggtttcgggttttgccatttttgtgagtttttgtttcttggtttaatgtgtggattagcaatgtaattatgaacctatgatgtgtgatttggttaagatacttttaaggttatggttatggtagttaccgt

SEQ ID NO: 100 - protein, 132 aa, Gossypium hirsutum
  REGION 58..132: note = Pfam Name: RALF Pfam Description: Rapid ALkalinization Factor (RALF)
  REGION 1..132: note = Ceres Clone ID no. 1914539
  REGION 1..132: note = Bit score of 297.0 for HMM based on sequences of Figure 9
  REGION 1..132: note = Functional Homolog Of SEQ ID NO. 77
MASSSLLSKLLLLLFISYIVLWGSKVDAQVEETSLKLMRDALEWPLSVSLYSDLNDNEGEEEVDGEEETGHSRRSLFWTRMRYYISYSALSANRIPCPPRSGRSYYTNNCFKAHGSVHPYSRGCSRITRCRR

SEQ ID NO: 101 - DNA, 756 bp, Glycine max
  misc_feature 1..756: note = Ceres Clone ID no. 668581
  misc_feature 1..756: note = Encodes the peptide sequence at SEQ ID NO. 102
  source 1..756: mol_type = unassigned DNA
gattaacttcacacttcactctctagtcatggcttcttctcttcctcttctcaaccttcttaccctcgctctgtcactactcttctgcattgccttaacttccgaggttggcgtgcaggcgcagatggaggagacaggcttgaacctcatgtcggaggcgttggagtggccaaccgcaatgtcgctctacgacgaagacagcgaagaagaggatgtccagaacggttacagtcggagatcgttgttctggcggaggatgaagtactacatctcctacggcgctctttccgcgaaccgaatcccgtgcccacctcgttctggtagatcttactacacccacaactgctacagggcccgaggccccgttcacccttactccagaggctgctctgtcatcacgcgctgccggagatgagtgagttcggatctgatcacacgcgcgcctcacgcttcagatcgcaaataaaaaaaaccaccgtctagggtcttgttttgttagtgtactagatttattgtctatttaagcaagtcaaaagtgtcgtgtttcagtaacggttctcgttgcgctgcgctattttcatgaaccatctgtttgcttgctttgtgtgttactttatcatattcattcctttgtataaactcgaatgaactctatacgtggatgcgcaaatctgcttcctatctttgtattcccatcgcttacactctcttacgttgcaaattatgtatcctatctcatttcctttttcctttgtg

SEQ ID NO: 102 - protein, 128 aa, Glycine max
  REGION 57..128: note = Pfam Name: RALF Pfam Description: Rapid ALkalinization Factor (RALF)
  REGION 1..128: note = Ceres Clone ID no. 668581
  REGION 1..128: note = Bit score of 289.7 for HMM based on sequences of Figure 9
  REGION 1..128: note = Functional Homolog Of SEQ ID NO. 77
MASSLPLLNLLTLALSLLFCIALTSEVGVQAQMEETGLNLMSEALEWPTAMSLYDEDSEEEDVQNGYSRRSLFWRRMKYYISYGALSANRIPCPPRSGRSYYTHNCYRARGPVHPYSRGCSVITRCRR

SEQ ID NO: 103 - DNA, 639 bp, Gossypium hirsutum
  misc_feature 1..639: note = Ceres Clone ID no. 1914939
  misc_feature 1..639: note = Encodes the peptide sequence at SEQ ID NO. 104
  source 1..639: mol_type = unassigned DNA
aagccatggcttcttcttcatcagtacttctcagcaagcttattctcccccttttcatcactcacattgtccttacaacctccatagtcgaagctcaagtcgaagatacaagtttgaagctggtcagagatgctttagaaaggccacttccaatctcactttacagtgagttaaacgacgatgaagaagccgatgaagagatagatgatgatgaaggtgaaaatgggtacagtcgaagatctttgttttggaagagaatgaggtattacatttcatacggggcgctttgggctaacaggatcccgtgcccaccaaggtcaggcagatcttattacactcacaactgtttcaaggtccacgggcctgttcatccttacactaggggttgttcaaggatcactcgctgcaggagatgatgagcttgttaggaaaaaaaagggggggatgtaaaatcactaaaatggtgcaagctttgagtgctaagctagctaaaatattatgagtttttggtcttctcattttcttttttattaatgatggattagcaatgtgattgtgaacttattataacgagcattcgtgttcaagtatttgatcatgtgatgggttagaataattagattgcagaagattcaagtt

SEQ ID NO: 104 - protein, 136 aa, Gossypium hirsutum
  REGION 64..136: note = Pfam Name: RALF Pfam Description: Rapid ALkalinization Factor (RALF)
  REGION 1..136: note = Ceres Clone ID no. 1914939
  REGION 1..136: note = Bit score of 301.3 for HMM based on sequences of Figure 9
  REGION 1..136: note = Functional Homolog Of SEQ ID NO. 77
MASSSSVLLSKLILPLFITHIVLTTSIVEAQVEDTSLKLVRDALERPLPISLYSELNDDEEADEEIDDDEGENGYSRRSLFWKRMRYYISYGALWANRIPCPPRSGRSYYTHNCFKVHGPVHPYTRGCSRITRCRR

SEQ ID NO: 105 - DNA, 644 bp, Glycine max
  misc_feature 1..644: note = Ceres Clone ID no. 723694
  misc_feature 1..644: note = Encodes the peptide sequence at SEQ ID NO. 106
  source 1..644: mol_type = unassigned DNA
cacacttcactctctagtcatggcttcttctcttcctcttctcaaccttcttaccctcgctctgtcactactcttctgcattgccttaacttccgaggttggcgtgtaggcgcagatggaggagacaggcttgaacctcatgtcggaggcgttggagtggccaaccgcaatgtcgctctacgacgaagacagcgaagaagaggatgtccagaacggttacagtcggagatcgttgttctggcggaggatgaagtactacatctcctacggcgctctttccgcgaaccgaatcccgtgcccacctcgttctggtagatcttactacacccacaactgctacagggcccgaggccccgttcacccttactccagaggctgctctgtcatcacgcgctgccggagatgagtgagttcggatctgatcacacgcgcgcctcacgcttcagatcgcaaataaaaaaaaccaccgtctagggtcttgttttgttagtgtactagatttattgtctatttaagcaagtcaaaagtgtcgtgtttcagtaacggttctcgttgcgctgcgctattttcatgaaccatctgtttgcttgctttgtgtgttactttatcatattcattcctttgtataaactcgaatgaactcg

SEQ ID NO: 106 - protein, 96 aa, Glycine max
  REGION 25..96: note = Pfam Name: RALF Pfam Description: Rapid ALkalinization Factor (RALF)
  REGION 1..96: note = Ceres Clone ID no. 723694
  REGION 1..96: note = Bit score of 229.2 for HMM based on sequences of Figure 9
  REGION 1..96: note = Functional Homolog Of SEQ ID NO. 77
MEETGLNLMSEALEWPTAMSLYDEDSEEEDVQNGYSRRSLFWRRMKYYISYGALSANRIPCPPRSGRSYYTHNCYRARGPVHPYSRGCSVITRCRR

SEQ ID NO: 107 - DNA, 396 bp, Populus balsamifera
  misc_feature 1..396: note = Ceres Annot ID no. 1456949
  misc_feature 1..396: note = Encodes the peptide sequence at SEQ ID NO. 108
  source 1..396: mol_type = unassigned DNA; note = Populus balsamifera subsp. trichocarpa
atgggaaattctacattgcaacactatttcaccttgttgatagtcctcttcactatctttcttgctttcagtccaagaatccaggctcaagtcgatgaaacaagcttgaaggcaatgggcgatgcgctagaatggccaatgtccatgtatttcgatgaaagtagtgagcttgatggtggattggtggatcttgatgacggtgaagaaactagtcgtagatctttactttggacgagaacgcattactacatctcatatggagctttgtctgccaatagaattccttgtcctgcaaggtccggtagatcttactatagccacaactgcttcaagtctaggattcctgtcaatccctactcaagagggtgttctaggatcactcgttgccggagatga

SEQ ID NO: 108 - protein, 131 aa, Populus balsamifera
  REGION 59..131: note = Pfam Name: RALF Pfam Description: Rapid ALkalinization Factor (RALF)
  REGION 1..131: note = Ceres Annot ID no. 1456949
  REGION 1..131: note = Bit score of 272.3 for HMM based on sequences of Figure 9
  REGION 1..131: note = Functional Homolog Of SEQ ID NO. 77
  source 1..131: note = Populus balsamifera subsp. trichocarpa
MGNSTLQHYFTLLIVLFTIFLAFSPRIQAQVDETSLKAMGDALEWPMSMYFDESSELDGGLVDLDDGEETSRRSLLWTRTHYYISYGALSANRIPCPARSGRSYYSHNCFKSRIPVNPYSRGCSRITRCRR

SEQ ID NO: 109 - DNA, 366 bp, Populus balsamifera
  misc_feature 1..366: note = Ceres Annot ID no. 1539918
  misc_feature 1..366: note = Encodes the peptide sequence at SEQ ID NO. 110
  source 1..366: mol_type = unassigned DNA; note = Populus balsamifera subsp. trichocarpa
atgaaggtttcagctctgagtttgattgctgcctccttaacttttctcattgttgttaaagctcaggttgatttaaaggatttcatccaactgacaagtgaagatcttgaatggccatcagcgttgtctgtctacgatgagttaagtgacactgaagacgaagagtatggcggcgggtctcataggaggtctctgcatgggagagcaaagcactattacgtatcatatggtgctctctctgcaaacagggtgccttgcccagctcgctcagggaggtcttactatacccattactgtttccgatcaagaggacaggctaacccctacaccagaggttgctcttgtatcactcactgcaggagataa

SEQ ID NO: 110 - protein, 121 aa, Populus balsamifera
  REGION 50..121: note = Pfam Name: RALF Pfam Description: Rapid ALkalinization Factor (RALF)
  REGION 1..121: note = Ceres Annot ID no. 1539918
  REGION 1..121: note = Bit score of 197.4 for HMM based on sequences of Figure 9
  REGION 1..121: note = Functional Homolog Of SEQ ID NO. 77
  source 1..121: note = Populus balsamifera subsp. trichocarpa
MKVSALSLIAASLTFLIVVKAQVDLKDFIQLTSEDLEWPSALSVYDELSDTEDEEYGGGSHRRSLHGRAKHYYVSYGALSANRVPCPARSGRSYYTHYCFRSRGQANPYTRGCSCITHCRR

SEQ ID NO: 111 - DNA, 354 bp, Solanum lycopersicum
  misc_feature 1..354: note = Ceres Annot ID no. 8456138
  misc_feature 1..354: note = Encodes the peptide sequence at SEQ ID NO. 112
  source 1..354: mol_type = unassigned DNA
atggagtctccaatacttctcttccttatcatcttcttattcacgattggcaaaaatgcagttgttgttgaagcagaagttgatagatttggtttagaacaagtggtgagtgaagattttgagttgccaatgggaatgtcgggtgatgatgagatccagttggatggaaatggaagatctctattgtggaacaaattcaagtactacatttcgtacggagcattatcagctaacagaatcccctgcccaccacggtctggcagatcgtattacacgcaccattgttatcatgctacaggtccagctcatccttacactagaggttgctctgctatcactcgttgccgtagatga

SEQ ID NO: 112 - protein, 117 aa, Solanum lycopersicum
  REGION 46..117: note = Pfam Name: RALF Pfam Description: Rapid ALkalinization Factor (RALF)
  REGION 1..117: note = Ceres Annot ID no. 8456138
  REGION 1..117: note = Bit score of 256.6 for HMM based on sequences of Figure 9
  REGION 1..117: note = Functional Homolog Of SEQ ID NO. 77
MESPILLFLIIFLFTIGKNAVVVEAEVDRFGLEQVVSEDFELPMGMSGDDEIQLDGNGRSLLWNKFKYYISYGALSANRIPCPPRSGRSYYTHHCYHATGPAHPYTRGCSAITRCRR

SEQ ID NO: 113 - DNA, 426 bp, Populus balsamifera
  misc_feature 1..426: note = Ceres Annot ID no. 1486506
  misc_feature 1..426: note = Encodes the peptide sequence at SEQ ID NO. 114
  source 1..426: mol_type = unassigned DNA; note = Populus balsamifera subsp. trichocarpa
atgaaggtttcagctctgagtttgattgctgcctccttaacttttctcattgttgttaaagctcaggttgatttaaaggatttcatccaactgacaagtgaagatcttgaatggccatcagcgttgtctgtctacgatgagttaagtgacactgaagacgaagagtatggcggcgggtctcataggaggtctctgcatgggagagcaaagcactattacgtatcatatggtgctctctctgcaaacagggtgccttgcccagctcgctcagggaggtcttactatacccattactgtttccgatcaagaggacaggctaacccctacaccagagcatgtgcagagattcagggggcttcacctcttgatttgtccgacactggagaagacaaggaatcgatgcggcgctttagatgctttgattaa

SEQ ID NO: 114 - protein, 141 aa, Populus balsamifera
  REGION 50..120: note = Pfam Name: RALF Pfam Description: Rapid ALkalinization Factor (RALF)
  REGION 1..141: note = Ceres Annot ID no. 1486506
  REGION 1..141: note = Bit score of 164.5 for HMM based on sequences of Figure 9
  REGION 1..141: note = Functional Homolog Of SEQ ID NO. 77
  source 1..141: note = Populus balsamifera subsp. trichocarpa
MKVSALSLIAASLTFLIVVKAQVDLKDFIQLTSEDLEWPSALSVYDELSDTEDEEYGGGSHRRSLHGRAKHYYVSYGALSANRVPCPARSGRSYYTHYCFRSRGQANPYTRACAEIQGASPLDLSDTGEDKESMRRFRCFD

SEQ ID NO: 115 - protein, 139 aa, Picea sitchensis
  REGION 66..136: note = Pfam Name: RALF Pfam Description: Rapid ALkalinization Factor (RALF)
  REGION 1..139: note = Public GI ID no. 116786293
  REGION 1..139: note = Bit score of 149.5 for HMM based on sequences of Figure 9
  REGION 1..139: note = Functional Homolog Of SEQ ID NO. 77
MGRLGTMLLLVVSLFLMAESLHTALNSQEVTATSNWLGSVASYEQRGFESSAGQICDGALGECNDETEEEFMMDSEAHGRLLRRVRYYISYGALAANRVPCRPRSGRSYYTRNCYAATGPVRPYHRSCTAITRCKRYTS

SEQ ID NO: 116 - DNA, 1296 bp, Arabidopsis thaliana
  misc_feature 1..1296: note = Ceres Annot ID no. 1355066
  misc_feature 1..1296: note = Encodes the peptide sequence at SEQ ID NO. 117
  source 1..1296: mol_type = unassigned DNA
atgaggctcctcttcagcttctgcttcttcttcttcatgatcatctttaccgcaactgcttatgatccattagatcctagtggtaacattacaatcaaatgggatattatgtcctggacggcagatggctatgtggctacggtaactatgaacaacttccaaatctaccggcacatacaaaaccctggttggacattaggttggacatgggcaaagaaagaggtgatttggtcaatggttggtgcacaaacaacagaacaaggagactgttccaagtttaagggaaatgtacctcattgctgtaagaaaacccctacagttgttgatctcttgccaggtgtgccttataatcaacagttctcaaactgttgcaaaggaggtgtaattggagcttggggtcaagatccatcagccgctgtatcccagtttcaggttagtgctggtttagctggaactacaaacaagactgtcaagcttcctaagaacttcactttgcttggtcccggccctggttacacttgcggtcctgccaaaatcgtgccctctaccgtttttctcacaactgacaaacggcgaaaaacacaagctttgatgacatggaatgttacctgcacatactcacagtttttagcaagaaagcatccaagctgttgtgtctccttctcttctttctacaacgacaccataactccttgcccgtcttgtgcctgtggctgcgagaacaaaaagagctgcgtcaaggctgattctaagattctaaccaagaaaggtctcaacacaccaaaaaaggacaacactcctttgttgcaatgcacacatcacatgtgccctgttagagtccactggcacgttaaaactaactacaaagactattggcgagtgaagatagcaatcacaaatttcaattaccggatgaatcatacactctggactttagcaattcagcatccaaatctcaacaatgtgactcaagttttcagctttgactacaaaccagtctctccttacggatccataaatgatactggaatgttctatggaacgaagttttacaatgatttattaatggaagctggaccttcagggaatgtgcaatcagaggttttgctacagaaagatcaaaagacttttactttcaagcaaggttgggcttttcctagaaaagtttactttaatggtgatgaatgtatgttacctccaccagattcatacccttttctaccaaactctgcacaagggaactttgcttcgttctcactcaccattcttcttctcctattcatctcaatatggtga

SEQ ID NO: 117 - protein, 431 aa, Arabidopsis thaliana
  REGION 44..208: note = Pfam Name: Phytochel_synth Pfam Description: Phytochelatin synthetase-like
  REGION 1..431: note = Ceres Annot ID no. 1355066
  REGION 1..431: note = Bit score of 1139.8 for HMM based on sequences of Figure 3
MRLLFSFCFFFFMIIFTATAYDPLDPSGNITIKWDIMSWTADGYVATVTMNNFQIYRHIQNPGWTLGWTWAKKEVIWSMVGAQTTEQGDCSKFKGNVPHCCKKTPTVVDLLPGVPYNQQFSNCCKGGVIGAWGQDPSAAVSQFQVSAGLAGTTNKTVKLPKNFTLLGPGPGYTCGPAKIVPSTVFLTTDKRRKTQALMTWNVTCTYSQFLARKHPSCCVSFSSFYNDTITPCPSCACGCENKKSCVKADSKILTKKGLNTPKKDNTPLLQCTHHMCPVRVHWHVKTNYKDYWRVKIAITNFNYRMNHTLWTLAIQHPNLNNVTQVFSFDYKPVSPYGSINDTGMFYGTKFYNDLLMEAGPSGNVQSEVLLQKDQKTFTFKQGWAFPRKVYFNGDECMLPPPDSYPFLPNSAQGNFASFSLTILLLLFISIW

SEQ ID NO: 118 - protein, 440 aa, Cleome spinosa
  REGION 49..213: note = Pfam Name: Phytochel_synth Pfam Description: Phytochelatin synthetase-like
  REGION 1..440: note = Public GI ID no. 90657534
  REGION 1..440: note = Bit score of 1163.7 for HMM based on sequences of Figure 3
  REGION 1..440: note = Functional Homolog Of SEQ ID NO. 117
MRLSISGFFFFFFFFFSVFIYCTSAYDPLDPNGNVTIKWDVMSWTPDGYVAVVAMNNFQMYRHIPNPGWTLGWTWAKKEVIWSMVGAQTTEQGDCSKFKGNVPHCCKKTPTLVDLLPGVPYNQQFSNCCKGGVVAAWGQDPSASVSQFQVSVGLAGTSNKTVKLPKNFTLLGPGLGYTCGPAKIVPSTIFLTPDKRRKTQALMTWNVTCTYSQFLARKHPSCCVSFSSFYNDTITPCPSCACGCESKKGCVKSDSKILSVKGINTPRKDNAPLLQCTHHMCPVRVHWHVKVNYKDYWRVKIAVTNFNYRMNFSLWTLAIQHPNLNNVTQVFSFDYKPLVPYESINDTGMFYGMKYYNDLLMEAGPFGNVQSEVLLQKDRNTFTFKQGWAFPRKVYFNGDECMLPPPDTYPFLPNSAHGNLSSLWTLPLALLLLLLLISIW

SEQ ID NO: 119 - DNA, 1587 bp, Glycine max
  misc_feature 1..1587: note = Ceres Clone ID no. 1237946
  misc_feature 1..1587: note = Encodes the peptide sequence at SEQ ID NO. 120
  source 1..1587: mol_type = unassigned DNA
aaaacttttgtcactgaaggtgtcttggagccaattgtagcagttggtaacatcaaacacatattcagacaatgaggcttgtcgtctcagctctttgtgttcttgtgttattctcttgtgcagttgcttatgatcctttggatccaaacggaaacgtaacaatcaaatgggatgtaatgtcttggacaccagatggctatgtggctgtggtaacaatgcacaacttccaaatgtttcggcacatcatgaatcctggatggaccttgggatggacatgggcaaagaaagaagtcatttggtccatgataggagctcaaaccacagaacaaggagattgctctaagttcaaaggcaacatacctcattgctgcaagaaaattcccacagttgtggaccttctccctggtgtaccttacaaccagcaattctcaaactgctgcaagggtggagtagtggcagcatggggccaagatccttcacaagctatctcttccttccaagtgagtgtaggccaagctggtacctcaaacaagacagttaaacttcccaagaacttcactctctttgctccaggaccaggctacacttgtggccctgcaaagattgttccttccaccaattttcttacgcctgacaagcgccgcaagactcaagcactaatgacatggaatgttacctgcacatactcacagtttctggcaagaaagaacccaagttgttgtgtatctttgtcatccttttacaatgaaaccattaccccttgtccctcttgtgcatgtggctgccagaacaagaagcattgtgtcaagggaaactccaaaattctcagcatggtgggggttcacactccaaagaaagacaatgaaccattgctgcagtgcactcatcacatgtgtccaatcagggtccactggcatgtgaagactaactataaggactattggcgagtcaaggttgccataacaaacttcaattacagaatgaatcactccctttggtctcttgctgttcagcatccaaatctcaacaatctcacacaagttttcagtttcaattacaagccacttcttccctatggatccataaatgatactggcatgttctatggcatgaagtacttcaatgatcttctaatggaagctggaccaactgggaatgttcaatcagagttgcttcttcagaaggacaaggatgcattcacattcaagcagggttgggcatttcctcgcaaggtttactttaatggtgatgaatgcatgctgccaccacctgacacctacccttttctccctaactctgctcctgcaagcctacttaacttccctgcgttcatgttgttattgttcttcttgcttgcagtttggtgaattggtgcatattgtgtcagaattttgtgaaatttttgaaaccatgtataccttcttaatggtaacgtgacaataggcatgaatactcaaattctttggaaacactaagccaaatctcatggctgtgttttatctgacatgtgagcaccaaaggggatgctaatatgtaaatctcaacagtgattttgtctgaatcatagattgatgatgctattactcc

SEQ ID NO: 120 - protein, 431 aa, Glycine max
  REGION 43..207: note = Pfam Name: Phytochel_synth Pfam Description: Phytochelatin synthetase-like
  REGION 1..431: note = Ceres Clone ID no. 1237946
  REGION 1..431: note = Bit score of 1142.4 for HMM based on sequences of Figure 3
  REGION 1..431: note = Functional Homolog Of SEQ ID NO. 117
MRLVVSALCVLVLFSCAVAYDPLDPNGNVTIKWDVMSWTPDGYVAVVTMHNFQMFRHIMNPGWTLGWTWAKKEVIWSMIGAQTTEQGDCSKFKGNIPHCCKKIPTVVDLLPGVPYNQQFSNCCKGGVVAAWGQDPSQAISSFQVSVGQAGTSNKTVKLPKNFTLFAPGPGYTCGPAKIVPSTNFLTPDKRRKTQALMTWNVTCTYSQFLARKNPSCCVSLSSFYNETITPCPSCACGCQNKKHCVKGNSKILSMVGVHTPKKDNEPLLQCTHHMCPIRVHWHVKTNYKDYWRVKVAITNFNYRMNHSLWSLAVQHPNLNNLTQVFSFNYKPLLPYGSINDTGMFYGMKYFNDLLMEAGPTGNVQSELLLQKDKDAFTFKQGWAFPRKVYFNGDECMLPPPDTYPFLPNSAPASLLNFPAFMLLLFFLLAVW

SEQ ID NO: 121 - protein, 453 aa, Populus balsamifera
  REGION 64..228: note = Pfam Name: Phytochel_synth Pfam Description: Phytochelatin synthetase-like
  REGION 1..453: note = Public GI ID no. 118488472
  REGION 1..453: note = Bit score of 1150.3 for HMM based on sequences of Figure 3
  REGION 1..453: note = Functional Homolog Of SEQ ID NO. 117
  source 1..453: note = Populus balsamifera subsp. trichocarpa
MEFDKSAKDCYQSLQRSLLAEMKFIFLIALVFMIVPHAAAYDPLDPNGNITIKWDVMSWTPDGYVATVTMSNFQMYRHIISPGWTLSWSWAKKEVLWSMVGAQTTEQGDCSKFKGNIPHCCKKTPTVVDLLPGVPYNQQFSNCCKGGVMAAWGQDPTASVSAFQVSVGLAGTSNKTVKLPKNFTLLGPGPGYTCGPAKVVPSTVFLTPDRRRKTQALMTWNVTCTYSQFLASKNPTCCVSFSSFYNETITPCPTCACGCQNKNSCVKSNSKESHKKGINTPKKDNTPLLQCTHHMCPIRVHWHVKVNYRDYWRAKVAVTNFNYRMNYTEWTLVVQHPNLNNVTQVFSFDYKPLVPYESINDTGMFYGMKFYNDLLMEAGPFGNVQSEVLLQKDKNTFSLKQGWAFPRKVYFNGDECMLPPPDTYPYLPNSAYANPTSILSMAASLLLILLSMG

SEQ ID NO: 122 - protein, 463 aa, Phaseolus vulgaris
  REGION 75..239: note = Pfam Name: Phytochel_synth Pfam Description: Phytochelatin synthetase-like
  REGION 1..463: note = Public GI ID no. 38194917
  REGION 1..463: note = Bit score of 1144.2 for HMM based on sequences of Figure 3
  REGION 1..463: note = Functional Homolog Of SEQ ID NO. 117
MRLVISAAVCVLVLFSYAGEITSTLYAEFASLSFTFHTRPTDFLMFLIVAAYDPLDPNGNVTIKWDVVSWTPDGYVAVVTMSNFQMFRHIMNPGWTLSWSWAKKEVIWSMVGAQTTEQGDCSKFKGNVPHCCKKTPTVVDLLPGVPYNQQFSNCCKGGVVAAWGQDPSSAVSSFQVSIGLAGTSNKTVKLPKNFTLLGPGPGYTCGPAKVVPSTVFLTADKRRKTQALMTWNVTCTYSQFLARKNPGCCVSLSSFYNETITPCPSCACGCQNKRNCIKSDSKRINMVGIHTPKKDNEPLLQCTHHMCPIRVHWHVKLNYMDYWRVKVAVTNFNYRMNYSLWTLAVQHPNLNNVTQVFSFDYKPILPYESINDTGMFYGMKYFNDLLMEAGPTGNVQSEILLQKDKDTFTLKQGWAFPRKVYFNGEECMLPPPDTYPILPNSAPVNLLNFTVFILTMLVMLALW

SEQ ID NO: 123 - protein, 460 aa, Vitis vinifera
  REGION 72..236: note = Pfam Name: Phytochel_synth Pfam Description: Phytochelatin synthetase-like
  REGION 1..460: note = Public GI ID no. 157341292
  REGION 1..460: note = Bit score of 1142.1 for HMM based on sequences of Figure 3
  REGION 1..460: note = Functional Homolog Of SEQ ID NO. 117
MRFVISAFFFLMMFSYTGELLDGSQASIRFNFVPLVQFSCSVFVYAAAYDPLDPNGNITIKWDIMSWTPDGYVAVVTMHNFQMYRHIISPGWTLGWTWAKKEVIWSMVGAQTTEQGDCSKFKGNIPHCCKKTPTVVDLLPGVPYNQQFSNCCKGGVVSSWGQDPAASVSAFQVSVGLAGTSNKTVKLPKNFTLLGPGPGYTCGIAKIVPPTNFLTPDRRRKTQALMTWNVTCTYSQLRARKNPSCCVSFSSFYNETITPCPSCACGCQNKNNCVQSDSKLLSMVGINTPRKDNVPLLQCTHHMCPVRVHWHLKINYKDYWRVKVSITNFNYRLNYTLWTLVVQHPNLNNVTQVFSFDYKPLVPYESINDTGMFYGMKFYNDQLMEAGPFGNVQSEVLFQKDNSFTFKQGWAFPRKVYFNGDECMLPLPETYPFLPNSAHQNLLAFSTFISSVIFLLVTVW

SEQ ID NO: 124 - DNA, 1846 bp, Panicum virgatum
  misc_feature 1..1846: note = Ceres Clone ID no. 1957107
  misc_feature 1..1846: note = Encodes the peptide sequence at SEQ ID NO. 125
  source 1..1846: mol_type = unassigned DNA
acgcaacgcaaccaaccaggcgtcggccagggccgccagccagctgatcgacgcctgcaggtctctctggtggtgacgtgccatctcgatcgatcgattccctcctccttggccggccggccgcccggcctttatttgccggcctcgacgaccttcctctaggaacttgtgctaccagctagcagcagcagtcagtagcggtagtgttcttgctgcggacgcggccggccggctcgacgtccacgatgaggctccgcgactccgccgcgatggtggctctggtgctcgcgctcacctgctccgttgcagtgggctacgatcccctggaccccaacggcaacatcaccatcaagtgggatgtcatctcctggacgcccgacgggtacgtggccatggtgacgatgagcaactaccagatgtaccgccacatcatggcgcccgggtggacggtggggtggtcgtgggccaagaaggaggtgatctggtccatggtcggcgcgcaggccacggagcagggcgactgctccaagttcaaggccggcatcccgcactgctgcaagcgcacccccgccgtcgtcgacctcctcccgggcgtcccctacaaccagcagatcgccaactgctgcaaggccggcgtcgtcgccgcctacggccaggaccctgccgccgccgtctccgccttccaggtctccgtcggcctcgccggcaccaccaacaagacggtcaagctgcccaggaacttcaccctccagggccccggccccggctacacctgcggccccgcccggatcatcccctccaccgtctacctcacccccgaccgccgccgccggacgcaggcgctcatgacctgggcgctcacctgcacctactcgcagcagctcgcctccaagtacccctcctgctgcgtctccttctcctccttctacaacagcaccatcgtgccctgcgcccgctgcgcctgcggctgcggccacggcggccacggcgccgccggctgcatcgccggcgactccaagcgggcgctctcccccggcgtcaacacgccgcgcaaggacggccagccgctgctccagtgcacgccgcacatgtgcccggtgcgcgtccactggcacgtcaagctcaactacaaggactactggcgcgccaagatcgccatcaccaacttcaactaccggatcaactacacgcagtggacgctggtggcgcagcaccccaacctggacaacgtcaccgaggtcttcagcttccagtacaagccgctgctcccctacggcgccatcaacgacaccggcatgttctacgggctcaagttctacaacgacctgctcatggaggccgggcccttcggcaacgtgcagtccgaggtgctcatgcgcaaggacgcaagaaccttcaccttcagccagggctgggcgttcccgcggaagatctacttcaacggcgacgagtgcaagatgccgccgccggactcgtacccctacctgcccaactccgccccgctcgcggctccggtcatcgccaccgcggcctcggcgttcctgctggtggcgctgctcctggtggcgtgatcggtcatgggaattgggatgggctgccagggagcagagtaggcatggcgctctggagactgaaacgcttggcaatgtcatgtgtgttgttgcctgtgcagctgcacatagagagactagcagaccaatcaggctggcagagatcctggcacttttgagtctccaattactttttagacagcctgatcgagaacaaatgatagtatacatagtagagcacaaccttttttctgtggtttcgtcatgtacacataatgcagattattaattgttcg

SEQ ID NO: 125 - protein, 441 aa, Panicum virgatum
  REGION 47..211: note = Pfam Name: Phytochel_synth Pfam Description: Phytochelatin synthetase-like
  REGION 1..441: note = Ceres Clone ID no. 1957107
  REGION 1..441: note = Bit score of 1129.6 for HMM based on sequences of Figure 3
  REGION 1..441: note = Functional Homolog Of SEQ ID NO. 117
MRLRDSAAMVALVLALTCSVAVGYDPLDPNGNITIKWDVISWTPDGYVAMVTMSNYQMYRHIMAPGWTVGWSWAKKEVIWSMVGAQATEQGDCSKFKAGIPHCCKRTPAVVDLLPGVPYNQQIANCCKAGVVAAYGQDPAAAVSAFQVSVGLAGTTNKTVKLPRNFTLQGPGPGYTCGPARIIPSTVYLTPDRRRRTQALMTWALTCTYSQQLASKYPSCCVSFSSFYNSTIVPCARCACGCGHGGHGAAGCIAGDSKRALSPGVNTPRKDGQPLLQCTPHMCPVRVHWHVKLNYKDYWRAKIAITNFNYRINYTQWTLVAQHPNLDNVTEVFSFQYKPLLPYGAINDTGMFYGLKFYNDLLMEAGPFGNVQSEVLMRKDARTFTFSQGWAFPRKIYFNGDECKMPPPDSYPYLPNSAPLAAPVIATAASAFLLVALLLVA

SEQ ID NO: 126 - DNA, 1341 bp, Sorghum bicolor
  misc_feature 1..1341: note = Ceres Annot ID no. 8640603
  misc_feature 1..1341: note = Encodes the peptide sequence at SEQ ID NO. 127
  source 1..1341: mol_type = unassigned DNA
atggggctccgcgactcctccgtgctgctggccgctctgtccctcgcgctcgcctactgctccgtttcagtggtggcctacgatcccctggaccctcggggcaacatcacgataaagtgggacgtgatctcatggacgcccgacgggtacgtggcgatggtgacgatgagcaactaccagatgtaccggcacatcatgtccccgggctggacggtgggctggtcgtgggcgaagaaggaggtgatctggtccatcgtcggcgcgcaggccacggagcagggcgactgctccaagttcaaaggcggcatccctcactgctgcaagcgcacccccgccgtggtcgacctcctccccggggtgccctacaaccagcagatcgccaactgctgcaaggccggcgtcgtgtcggcgtacggccaggaccaggccggctccgtctccgcgttccaggtctccgtcggcctcgccggcaccaccaacaagacggtcaagctccccaagaacttcaccctcatgggtccggggccagggtacacctgcgggccggcgaccgtcgtcccgtccaccgtgtactggacgcccgaccaccggcgacggacgcaggcgctcatgacctggaccgtcacctgcacctactcgcagcagctggcgtccaagtacccgtcctgctgcgtctccttctcctccttctacaacgacaccatcgtgccctgcgccaagtgcgcctgcggctgcggccatggcggccacgccggaccgggaggctgcatcgagggggactccaagcgcgcgctgtcgccgggagtgaacacgccgcggaaggacgggcaggcgctgctgcagtgcacgccgcacatgtgccctgtccgtgtgcactggcatgtcaagctcaactacaaggactactggcgcgccaagatcgccatcaccaacttcaactacaggatgaactacacgcagtggacgctggtggcgcagcacccaaacctggacaatgtcaccgaggtcttcagcttccagtacaagccgctgctaccatacggcagcatcaatgacactggcatgttctacgggctcaagttctacaacgattttctgatggaggccgggccgttcgggaacgtgcagtcggaggtgctcatgcgcaaggacgccaggacattcaccttcagccagggatgggccttcccgcgcaagatctacttcaacggcgacgagtgcaagatgccgccgccggactcgtacccgtacctgcccaacgccgcgcccgtcgccgcctcgcagctggtcgtgtccgccgccgcctcagcgttcctactggcgctgctcctggtggcatga

SEQ ID NO: 127 - protein, 446 aa, Sorghum bicolor
  REGION 50..214: note = Pfam Name: Phytochel_synth Pfam Description: Phytochelatin synthetase-like
  REGION 1..446: note = Ceres Annot ID no. 8640603
  REGION 1..446: note = Bit score of 1129.8 for HMM based on sequences of Figure 3
  REGION 1..446: note = Functional Homolog Of SEQ ID NO. 117
MGLRDSSVLLAALSLALAYCSVSVVAYDPLDPRGNITIKWDVISWTPDGYVAMVTMSNYQMYRHIMSPGWTVGWSWAKKEVIWSIVGAQATEQGDCSKFKGGIPHCCKRTPAVVDLLPGVPYNQQIANCCKAGVVSAYGQDQAGSVSAFQVSVGLAGTTNKTVKLPKNFTLMGPGPGYTCGPATVVPSTVYWTPDHRRRTQALMTWTVTCTYSQQLASKYPSCCVSFSSFYNDTIVPCAKCACGCGHGGHAGPGGCIEGDSKRALSPGVNTPRKDGQALLQCTPHMCPVRVHWHVKLNYKDYWRAKIAITNFNYRMNYTQWTLVAQHPNLDNVTEVFSFQYKPLLPYGSINDTGMFYGLKFYNDFLMEAGPFGNVQSEVLMRKDARTFTFSQGWAFPRKIYFNGDECKMPPPDSYPYLPNAAPVAASQLVVSAAASAFLLALLLVA

SEQ ID NO: 128 - DNA, 1540 bp, Triticum aestivum
  misc_feature 1..1540: note = Ceres Clone ID no. 829440
  misc_feature 1..1540: note = Encodes the peptide sequence at SEQ ID NO. 129
  source 1..1540: mol_type = unassigned DNA
gtattctaattttcgccctttaatcagctccatcgatggagctccccaactctatgctcctggctctgttcctcgcgatcacctgctccgtcgcagctgcgtatgatccgctggacccgacgggcaacattacgatcaagtgggacatccagtcatggacgccggacgggtacgtggcgatggtggcgatgaacaactaccagcagtaccgtcagatcatggcgccggggtggacgctggggtggtcgtgggccaagaaggaggtgatctggtccatcgtgggcgcgcaggccacggagcagggcgactgctccaagttcaagggcggcatcccgcactgctgcaagcacacgccctccgtcgtcgacctcctccccggcgtgccctacaaccagcagatcgccaactgctgccgcggcggcgtcgtctccgcctacggccaggacccggccggcgcgctctcggcgttccaggtctccgtggggctcgccggcaccaccaacaagacggtgaagctgcccaaaaacttcacgctcatggggcccgggctcggctacacctgcggccccgccaccgtcgtcccctccaccgtgtactggagcgccgaccaccgccgcaagacgcaggcgctgatgacctggacggtgacctgcacctactcgcagcagctggcgtcgaggtacccgacgtgctgcgtctccttctcctccttctacaacagcacgatcgtgccgtgcgcccggtgcgcgtgcggctgcggcgcgcacaagagcacgggcgggcgcggcggcaagagccacagcgacgggtgcatcgccggcgactccaagcgcgcgctgacccccggggtgaacacgcccaagaaggacggggcgcagctgctgcagtgcaccaaccacatgtgccccatccgcgtgcactggcacgtcaagctcaactacaaggactactggcgcgccaagatcgccgtcaccaacttcaactaccgcatgaactacacgcagtggacgctcgtcgctcagcacccgaacctcaacaacgtcacggaggtcttcagcttccagtacaagccgctcctgccatacggcaacatcaacgacaccggcatgttctacggcctcaagctctacaacgacctgctcatggaggccggcccgttcggcaacgtgcagtcggaggtgctcatgcgcaaggacgacgccaccttcaccttcggtcagggatgggctttcccgcgcaagatctacttcaacggcgatgagtgcaagatgccgccgccggactcgtacccgtacctgcccaactccgcgccgccgcgttcttccatcatcaccgctgctgcctcaacgtgcctggtgttgctgctcctgctcctggcggcgtgatctatatatcctggtgccacaattttcccattttgtaaaagacaacgcactgttgtaggtaggggcattttggtcttgcgagtattttaccttgtacaccaagatggtatgttcaagtgatttcatggtaatccttaagggaaacgttaccttcc

SEQ ID NO: 129 - protein, 449 aa, Triticum aestivum
  REGION 46..210: note = Pfam Name: Phytochel_synth Pfam Description: Phytochelatin synthetase-like
  REGION 1..449: note = Ceres Clone ID no. 829440
  REGION 1..449: note = Bit score of 1116.3 for HMM based on sequences of Figure 3
  REGION 1..449: note = Functional Homolog Of SEQ ID NO. 117
MELPNSMLLALFLAITCSVAAAYDPLDPTGNITIKWDIQSWTPDGYVAMVAMNNYQQYRQIMAPGWTLGWSWAKKEVIWSIVGAQATEQGDCSKFKGGIPHCCKHTPSVVDLLPGVPYNQQIANCCRGGVVSAYGQDPAGALSAFQVSVGLAGTTNKTVKLPKNFTLMGPGLGYTCGPATVVPSTVYWSADHRRKTQALMTWTVTCTYSQQLASRYPTCCVSFSSFYNSTIVPCARCACGCGAHKSTGGRGGKSHSDGCIAGDSKRALTPGVNTPKKDGAQLLQCTNHMCPIRVHWHVKLNYKDYWRAKIAVTNFNYRMNYTQWTLVAQHPNLNNVTEVFSFQYKPLLPYGNINDTGMFYGLKLYNDLLMEAGPFGNVQSEVLMRKDDATFTFGQGWAFPRKIYFNGDECKMPPPDSYPYLPNSAPPRSSIITAAASTCLVLLLLLLAA

SEQ ID NO: 130 - DNA, 1684 bp, Zea mays
  misc_feature 1..1684: note = Ceres Clone ID no. 285169
  misc_feature 1..1684: note = Encodes the peptide sequence at SEQ ID NO. 131
  source 1..1684: mol_type = unassigned DNA
attcgccctgcctctagctgctgcttcttccaggatcggggatcggagcttgtgctgctactgctactataccagcgctagctagcagcagccgccggccggctcgcgcaactaaggaagggtcgacatgacgatggggctccgcgtccgcgactcctccgcgctgctggctctggccgtcgcgctcgcctgctgctccgttgcagtggtggcctacgaccccctggacccgaacggcaacatcaccatcaagtgggacgtgatctcgtggacgcccgacgggtacgtggcgatggtgacgatgagcaactaccagatgtaccggcacatcatggcgcccgggtggacgttggggtggtcgtgggccaagaaggaggtgatctggtccatcgtgggggcgcaggccacggagcagggggactgctccaagttcaagggcggcatcccgcactgctgcaagcgcaccccggccgtggtggacctcctcccgggggtgccctacaaccagcagatcgccaactgctgcaaggccggcgtggtgtcggcgtacgggcaggacccggcggggtccgtctccgcgttccaggtctccgtcggcctggccggtaccaccaacaagacggtgaagctgcccaggaacttcacgctcatggggcccgggctgggctacacctgcgggcccgccgccgtggtgccgtccaccgtgtactggacgcccgaccaccggcgccggacgcaggcgctcatgacgtggacggtgacctgcacctactcgcagcagctggcgtcccggtacccgtcctgctgcgtctccttctcctccttctacaacagcaccatcgtgccgtgcgcccggtgcgcgtgcggctgcggcggccacggcggccacgcgggtccgggcggctgcatcgagggggactccaagcgcgcgctgtcggccggggtgaacacgccgcgcaaggacggccaggcgctgctgcagtgcacgccgcacatgtgccccatccgggtgcactggcacgtcaagctcaactacaaggactactggcgcgccaagatcgccatcaccaactacaactacaggatgaactacacgcagtggacgctggtggcgcagcaccccaacctggacaacgtcaccgaggtcttcagcttccagtacaagccgctgcaaccatacgggagcatcaatgacactggcatgttctacgggctcaagttctacaacgactttctcatggaggccggcccgttcggcaacgtgcagtcggaggtgctcatgcgcaaggacgcaaggaccttcaccttcagcatgggctgggcgttcccgcgcaagatctacttcaacggcgacgagtgcaagatgccgccgccggactcctacccctacctgcccaacgccgcgcccgtcgtcgcctcgcagctggtcctgtccgccgccgcctcggcgttcctactgttgctgctcctggtggcatgaccgtgaccgaaccaagggcaaggcctccgttttgttttcccgtctcgtcccgtgggcagggagcagacttcagtaggcagggcattttatttggtttttttgccaaggattcaacacttgggttttcgtcagaggaaaactgtcgtgtatgtagtgtgagttgcaggtcgtcggatccccacgtacaagacaatctttggatcg

SEQ ID NO: 131 - protein, 450 aa, Zea mays
  REGION 53..217: note = Pfam Name: Phytochel_synth Pfam Description: Phytochelatin synthetase-like
  REGION 1..450: note = Ceres Clone ID no. 285169
  REGION 1..450: note = Bit score of 1123.0 for HMM based on sequences of Figure 3
  REGION 1..450: note = Functional Homolog Of SEQ ID NO. 117
MTMGLRVRDSSALLALAVALACCSVAVVAYDPLDPNGNITIKWDVISWTPDGYVAMVTMSNYQMYRHIMAPGWTLGWSWAKKEVIWSIVGAQATEQGDCSKFKGGIPHCCKRTPAVVDLLPGVPYNQQIANCCKAGVVSAYGQDPAGSVSAFQVSVGLAGTTNKTVKLPRNFTLMGPGLGYTCGPAAVVPSTVYWTPDHRRRTQALMTWTVTCTYSQQLASRYPSCCVSFSSFYNSTIVPCARCACGCGGHGGHAGPGGCIEGDSKRALSAGVNTPRKDGQALLQCTPHMCPIRVHWHVKLNYKDYWRAKIAITNYNYRMNYTQWTLVAQHPNLDNVTEVFSFQYKPLQPYGSINDTGMFYGLKFYNDFLMEAGPFGNVQSEVLMRKDARTFTFSMGWAFPRKIYFNGDECKMPPPDSYPYLPNAAPVVASQLVLSAAASAFLLLLLLVA

SEQ ID NO: 132 - protein, 471 aa, Picea sitchensis
  REGION 69..234: note = Pfam Name: Phytochel_synth Pfam Description: Phytochelatin synthetase-like
  REGION 1..471: note = Public GI ID no. 116790012
  REGION 1..471: note = Bit score of 1051.6 for HMM based on sequences of Figure 3
  REGION 1..471: note = Functional Homolog Of SEQ ID NO. 117
MMEKRELNSSRGQRCMQNCHILNKNAAGFFLALTILAIAFSPAGAYDPLDPNGNITIKWDIVSWTADGYVAAVTMHNFQQYRHIPSPPGWTLGWNWAKKEVIWAVVGGQTTEQGDCSKWKAGSPHCCKKDPTVVDLLPGVPYNQQFTNCCKGGALASWAQDPPNSVASFQVSVGNSGTTNKTVKLPKNFTLKAPGPGYTCGPAKIVKSSLFFSTDRRRTTQALMTWNVTCTYSQFLAQKSSTCCVSLSSFYNDTITPCPTCACACRNNVTQPSCVHSDSPVLKLPGPTNPITNSLQPPLLQCTRHMCPVRVHWHVKLNYKDYWRVKITVTNFNYRMNYTDWTLVAQHPNFDNVTQVFSFNYKPLTPYGSINDTAMFWGQKYYNDLLMQAGPMGSVQSELLLRKDKQTFTFKQGWAFPRRLYFNGDQCVMPSPDAYPWLPSTAHPAPAPPSLFAFILPLALALAIVPSLFLP

SEQ ID NO: 133 - protein, 462 aa, Vitis vinifera
  REGION 74..238: note = Pfam Name: Phytochel_synth Pfam Description: Phytochelatin synthetase-like
  REGION 1..462: note = Public GI ID no. 157356290
  REGION 1..462: note = Bit score of 1096.4 for HMM based on sequences of Figure 3
  REGION 1..462: note = Functional Homolog Of SEQ ID NO. 117
MEFNNSANPVHHTPFEAKDRCQWQDCYSFRELKHIFSVVIFFMMVSHAIAYDPLDPTGNITIKWDVVSWTPDGYVALVTMNNFQMYRHIMTPGWTLSWSWAKKEVIWSMVGAQTTEQGDCSKFKANIPHCCEKTPTVVDLLPGVPYNQQIANCCKAGVVAAWGQDPAGSVSSFQVSVGQAGTSNKTVKLPKNFTLLGPGPGYTCGPAKIVPSTIYLTPDHRRKTQAMMTWNVTCTYSQFLASKNPTCCVSFSSFYNDTMTPCPSCACGCRNKNMCISSDSKKLKALHNPKRSNTPLLQCTHHMCPIRVHWHVKLNYKDYWRVKIAITNFNYRMNYTQWTLVAQHPNLNNVTQVFSFDYKPLVPYESINDTGMFYGMKFYNDLLVEAGQHGNVQSEVLLQKNKDTFTFKQGWAFPRKVYFNGDECKLPPPDTYPFLPNSAHANPFAFWTMAAPLLLMILYTIW

SEQ ID NO: 134 - DNA, 1296 bp, Populus balsamifera
  misc_feature 1..1296: note = Ceres Annot ID no. 1450186
  misc_feature 1..1296: note = Encodes the peptide sequence at SEQ ID NO. 135
  source 1..1296: mol_type = unassigned DNA; note = Populus balsamifera subsp. trichocarpa
atgagatttctcttctttattgtcttgtttcttgtgctcttttcttgttcaggtgcatatgatcctttggatccaactggaaatgtaacaataaaatgggatattatgtcttggacgacagatggctatattgcaattgtaacattgttcaacttccaaacgttccggcacttcatgaaacctggatggaccataggctggacatgggcaaagaaagaaatcatatggtccatcaatggtgctcaagcggttgaacaaggcgactgctccaagttcaaagcaaacatacctcattcctgcaagagaagccctgcagttgtggacttgcttcccggtgctcctttcaaccagcaattcggtaattgttgcaaaggcggagtagtggcagcatggggcaaagatccttcagctgctgtctctcaatttcagattactgttggattatccggtacttcaaataaaacagtgaaacttccaaagagcttcaccttgttaggtccaggaccaggatacacttgtggccctccaaagatggtgccttccaccaagtttcttactcctgatggtctgcgaagaactcaggccctgttgacttggaatgttacctgcacttactcacaattcatggcaagaaaaaacccaagttgctgtgtatctctttcatctttctacaatcagatactcactccctgcccaacttgtgcgtgcggttgccaaaacaatgacacttgtgtcaatggcgattccagaattcttcaattgccggtaggaaacacaacccggaaagataatagctctcttctgcaatgcacacaccatatgtgcccggttcgagtgcactggcatgtgaaggtgaactataaggagtactggcgtgtcaagattgcgatcacaaatttcaactacatgaagaactactcgacttggaccctcgttgtacagcatccgaatctcaacaacgtaacgcaagtttttagcttcgagtacaaacctctcattgcctatgactcgataaatgacacagggatgttctatggcatgaaggactacaatgacgtattaatggaagcagggccacttggaaatcttcaatctgaggtgcttcttcagaaggaccagaacactttcaccttcaagcagggatgggcatttccacggaaagtctacttcaatggcgatgagtgcatggtacccccgccagatacatacccatttctgcccaattctgctcatggatccccacacttctccatgttgatttctacgttgattttcctgttcgtgtatatctggtaa

SEQ ID NO: 135 - protein, 431 aa, Populus balsamifera
  REGION 43..207: note = Pfam Name: Phytochel_synth Pfam Description: Phytochelatin synthetase-like
  REGION 1..431: note = Ceres Annot ID no. 1450186
  REGION 1..431: note = Bit score of 992.2 for HMM based on sequences of Figure 3
  REGION 1..431: note = Functional Homolog Of SEQ ID NO. 117
  source 1..431: note = Populus balsamifera subsp. trichocarpa
MRFLFFIVLFLVLFSCSGAYDPLDPTGNVTIKWDIMSWTTDGYIAIVTLFNFQTFRHFMKPGWTIGWTWAKKEIIWSINGAQAVEQGDCSKFKANIPHSCKRSPAVVDLLPGAPFNQQFGNCCKGGVVAAWGKDPSAAVSQFQITVGLSGTSNKTVKLPKSFTLLGPGPGYTCGPPKMVPSTKFLTPDGLRRTQALLTWNVTCTYSQFMARKNPSCCVSLSSFYNQILTPCPTCACGCQNNDTCVNGDSRILQLPVGNTTRKDNSSLLQCTHHMCPVRVHWHVKVNYKEYWRVKIAITNFNYMKNYSTWTLVVQHPNLNNVTQVFSFEYKPLIAYDSINDTGMFYGMKDYNDVLMEAGPLGNLQSEVLLQKDQNTFTFKQGWAFPRKVYFNGDECMVPPPDTYPFLPNSAHGSPHFSMLISTLIFLFVYIW

SEQ ID NO: 136 - DNA, 1576 bp, Panicum virgatum
  misc_feature 1..1576: note = Ceres Clone ID no. 1804732
  misc_feature 1..1576: note = Encodes the peptide sequence at SEQ ID NO. 137
  source 1..1576: mol_type = unassigned DNA
aaccaaatgcggcgtcctgctggtgtggtctagcgagccgcgtggtgcttgggctccgttcgttccgttgaggctcgcgtcgatctagcgatggagccccggtgctccgtgatggtcctggccctcgccgccgcgctatccgtcgcagtggcttacgacccgctggacccgaacgggaacattaccatcaaatgggacatcatgtcgtggacgcctgacggctatgtcgcggtggtgacgatcaacaacttccagatgtaccggcagatcatggcgccggggtggacggtggggtggacgtgggccaagaaggaggtgatctggtccatggtgggcgcgcaggccacggagcagggcgactgctcccgcttcaagggcaacatcccgcactgctgcaagcgcacccccgccgtcgtggacctgctgcccggcgtgccctacaaccagcagatcgccaactgctgccggggcggcgtcatcagcgcctacggccaggaccccggcgccgccgtcgccgcgttccaggtcagcgtcggccaggccggcaccaccaaccgcaccgtcaaggtgcccaagaacttcacgctgctcggccccggccctgggtacacctgcggccccgccaaggtcgtcccctccaccgtcttcctcacgcccgaccgccgccgcaagacccaggcactcatgacgtggaacgtgacgtgcacctactcgcagtacctggcgtccaagtacccgtcctgctgcgtctctttctcctccttctacaacgacaccatcgtgccctgcgccaagtgcgcctgcggctgcgagcacaagacctgcgtccagggcgactcgaagcggccgctggcggtgacggggaagcacacgcacgcggcggcgacgcgcgggcaccgggacaaggaggcgccgctgctgcagtgcacgacgcacatgtgccccgtgcgcgtgcactggcacgtcaagctcaactacaaggagtactggcgcgccaagatcgccatcaccaacttcaactaccgcatgaactacacgcagtggacgctcgtcgcgcagcaccccaacctcgacaacatcaccgaggtcttcagcttcgactacaagcccgtcgttgcctacggatccatcaatgacacggccatgttctacgggctcaagtacttcaacgaccacctcatgcaggcggggccgtacgggaacgtgcagtcggaggtgctcatgcgcaaggacgccagcaccttcaccttcaggcagggctgggcgttcccgcgcaaggtctacttcaacggcgatgagtgccagatgccgccgccggacgcctacccctacctgcccaacgccgccctgccggcccccgtggcgtcgctgggcgccgcggtggtggccgtcgtggcgttcctggtgctggtcgtggtatgagacatgagaaaaacacaggagagcgatcgacctagcgctagaatcggccggcatggggagaaaaagacgacgatgttttgctctgtagatacagtcgacgttttgacttttgagtttcaggattggtttggatatctaagtttttttttctttc

SEQ ID NO: 137 - protein, 443 aa, Panicum virgatum
  REGION 45..209: note = Pfam Name: Phytochel_synth Pfam Description: Phytochelatin synthetase-like
  REGION 1..443: note = Ceres Clone ID no. 1804732
  REGION 1..443: note = Bit score of 1050.0 for HMM based on sequences of Figure 3
  REGION 1..443: note = Functional Homolog Of SEQ ID NO. 117
MEPRCSVMVLALAAALSVAVAYDPLDPNGNITIKWDIMSWTPDGYVAVVTINNFQMYRQIMAPGWTVGWTWAKKEVIWSMVGAQATEQGDCSRFKGNIPHCCKRTPAVVDLLPGVPYNQQIANCCRGGVISAYGQDPGAAVAAFQVSVGQAGTTNRTVKVPKNFTLLGPGPGYTCGPAKVVPSTVFLTPDRRRKTQALMTWNVTCTYSQYLASKYPSCCVSFSSFYNDTIVPCAKCACGCEHKTCVQGDSKRPLAVTGKHTHAAATRGHRDKEAPLLQCTTHMCPVRVHWHVKLNYKEYWRAKIAITNFNYRMNYTQWTLVAQHPNLDNITEVFSFDYKPVVAYGSINDTAMFYGLKYFNDHLMQAGPYGNVQSEVLMRKDASTFTFRQGWAFPRKVYFNGDECQMPPPDAYPYLPNAALPAPVASLGAAVVAVVAFLVLVVV

SEQ ID NO: 138 - DNA, 1566 bp, Panicum virgatum
  misc_feature 1..1566: note = Ceres Clone ID no. 1781794
  misc_feature 1..1566: note = Encodes the peptide sequence at SEQ ID NO. 139
  source 1..1566: mol_type = unassigned DNA
caggaacttgtcccaccagctagcagtcagtagcggtgttcttgcagaggcggccggccggctcgacgtgcgtcgacgatggggctccgccgcgactccgccgccgcgctggtggctctggtgctcgcggtcacctgctgctccgttgcagtagtggcctacgatcccctggacccgaacggcaacatcaccatcaagtgggacgtcatctcctggacgcccgacggctacgtggcgatggtgacgatgagcaactaccagatgtaccggcacatcatggcgcccgggtggacggtggggtggtcgtgggccaagaaagaggtgatctggtccatcgtgggcgcgcaggccacggagcagggcgactgctccaagttcaaggccggcatcccgcactgctgcaagcgcacccccgccgtggtggacctcctcccgggcgtaccctacaaccagcagatcgccaactgctgcaaggccggcgtcgtcgccgcctacggccaggaccccaccgccgccgtctccgccttccaggtctccgtcggcctcgccggcaccaccaacaagaccgtcaagctccccaccaacttcaccctccagggccccggcccgggctacacctgcggccccgcccgcgtcgtcccctccaccgtctacctcacccccgaccgccgccgccgcacgcaggcgctcatgacctggaccgtcacctgcacctactcccagcagctcgcctcccggtacccctcctgctgcgtctccttctcctccttctacaacagcaccatcgtgccctgcgcccactgcgcctgcggctgcggccatggcggccacggcggcgccggctgcatcgccggcgactccaagcgcgcgctctcccccggcgtcaacacgccgcgcagggacgggcagccgctgctgcagtgcacgccgcacatgtgcccggtgcgcgtccactggcacgtcaagctcaactacaaagactactggcgcgccaagatcgccatcaccaacttcaactaccggatcaactacacgcagtggacgctggtggcgcagcaccccaacctggacaacgtcaccgaggtcttcagcttccagtacaggccgctgctgccctacggcgccatcaacgacaccggcatgttctacgggctcaaattctacaacgacctgctcatggaggccgggcctttcggcaacgtgcagtccgaggtgctcatgcgcaaggacgccagaaccttcaccttcagccagggatgggccttcccaaggaagatctacttcaacggcgacgagtgcaagatgccgccgccggactcctacccctacctgcccaacaggtccgcccgggttgcggcaccgtcggtgatcgcctcggcattcctgctggcgctgctgctcctgctggcgccgtgattgatagggagcagcagagtgtgttgttacctgtgcagcggtggtttcgtcatgtaaacataacgcggtgggatctccaattactttctagacagcctgagaacaaatgatagtaatacatagtagagcacaagcctttttctgcggttt

SEQ ID NO: 139 - protein, 445 aa, Panicum virgatum
  REGION 51..215: note = Pfam Name: Phytochel_synth Pfam Description: Phytochelatin synthetase-like
  REGION 1..445: note = Ceres Clone ID no. 1781794
  REGION 1..445: note = Bit score of 1098.5 for HMM based on sequences of Figure 3
  REGION 1..445: note = Functional Homolog Of SEQ ID NO. 117
MGLRRDSAAALVALVLAVTCCSVAVVAYDPLDPNGNITIKWDVISWTPDGYVAMVTMSNYQMYRHIMAPGWTVGWSWAKKEVIWSIVGAQATEQGDCSKFKAGIPHCCKRTPAVVDLLPGVPYNQQIANCCKAGVVAAYGQDPTAAVSAFQVSVGLAGTTNKTVKLPTNFTLQGPGPGYTCGPARVVPSTVYLTPDRRRRTQALMTWTVTCTYSQQLASRYPSCCVSFSSFYNSTIVPCAHCACGCGHGGHGGAGCIAGDSKRALSPGVNTPRRDGQPLLQCTPHMCPVRVHWHVKLNYKDYWRAKIAITNFNYRINYTQWTLVAQHPNLDNVTEVFSFQYRPLLPYGAINDTGMFYGLKFYNDLLMEAGPFGNVQSEVLMRKDARTFTFSQGWAFPRKIYFNGDECKMPPPDSYPYLPNRSARVAAPSVIASAFLLALLLLLAP

SEQ ID NO: 140 - DNA, 1341 bp, Sorghum bicolor
  misc_feature 1..1341: note = Ceres Annot ID no. 8656625
  misc_feature 1..1341: note = Encodes the peptide sequence at SEQ ID NO. 141
  source 1..1341: mol_type = unassigned DNA
atggagccccgatgcttcgtgctggtcctggccctcgccgccgcgctctccgtcgcagtggcttacgacccgttggacccgaacgggaacattaccatcaaatgggacatcatgtcgtggacgcctgacggctatgtcgcggtggtgaccatcaacaacttccagatgtaccggcagatcatggcgccggggtggacggtggggtggacgtgggcgaagcgtgaggtgatctggtccatggtgggcgcgcaggcgacggagcagggcgactgctcccgcttcaaggccaacatcccgcactgctgcaagcgcacgcccaccgtcgtcgacctgctccccggcgtgccctacaaccagcagatcgccaactgctgccgcggcggcgtcatcagcgcctacggccaggacccggcctccgccgtcgccgcgttccaggtcagcgtcggccaggccggcaccaccaaccgcaccgtcaaggttcccaagaacttcacgctgcttgggccagggccagggtacacctgcggccccggcaagattgttccctccaccgtcttcctcacgcccgaccgccggcgcaagacacaagccctcatgacgtggaacgtgacgtgcacctactcgcagcacctggcgtccaagtacccgtcctgctgcgtctccttctcctccttctacaacgacaccatcgtgccctgcgccaagtgcgcctgcggctgcgagcacaagacctgcgtccagggcgactcgaagcggctggcggtgacggggaagcacgagcacgcgcacgcggcggcggcgcgcgggcacagggacaaggaggcgccgctgctgcagtgcacgacgcacatgtgccccgtgcgcgtgcactggcacgtcaagctcaactacaaggagtactggcgggccaagatcgccatcaccaacttcaactaccacatgaactacacgcagtggacgctcgtcgcgcagcaccccaacctcgacaacatcaccgaggtcttcagcttcgactacaagcctgtcgtcgcctacggatccatcaatgacacggcgatgttctacgggctcaagtacttcaacgaccacctgatgcaggcggggccgtacgggaacgtgcagtcggaggtgctgatgcgcaaggacgccagcaccttcaccttcaggcagggctgggcgttcccgcgcaaggtctacttcaacggcgacgagtgccagatgccgccgccggacgagtatccctacttgcccaactcagccctgccggcagccgcggcgtcgtcgtcgctgggcgctgcggtagcggccgtcgtggtgctcttggtgatgatcgtggcatga

SEQ ID NO: 141 - protein, 446 aa, Sorghum bicolor
  REGION 45..209: note = Pfam Name: Phytochel_synth Pfam Description: Phytochelatin synthetase-like
  REGION 1..446: note = Ceres Annot ID no. 8656625
  REGION 1..446: note = Bit score of 1042.9 for HMM based on sequences of Figure 3
  REGION 1..446: note = Functional Homolog Of SEQ ID NO. 117
MEPRCFVLVLALAAALSVAVAYDPLDPNGNITIKWDIMSWTPDGYVAVVTINNFQMYRQIMAPGWTVGWTWAKREVIWSMVGAQATEQGDCSRFKANIPHCCKRTPTVVDLLPGVPYNQQIANCCRGGVISAYGQDPASAVAAFQVSVGQAGTTNRTVKVPKNFTLLGPGPGYTCGPGKIVPSTVFLTPDRRRKTQALMTWNVTCTYSQHLASKYPSCCVSFSSFYNDTIVPCAKCACGCEHKTCVQGDSKRLAVTGKHEHAHAAAARGHRDKEAPLLQCTTHMCPVRVHWHVKLNYKEYWRAKIAITNFNYHMNYTQWTLVAQHPNLDNITEVFSFDYKPVVAYGSINDTAMFYGLKYFNDHLMQAGPYGNVQSEVLMRKDASTFTFRQGWAFPRKVYFNGDECQMPPPDEYPYLPNSALPAAAASSSLGAAVAAVVVLLVMIVA

SEQ ID NO: 142 - protein, 447 aa, Zea mays
  REGION 47..211: note = Pfam Name: Phytochel_synth Pfam Description: Phytochelatin synthetase-like
  REGION 1..447: note = Public GI ID no. 162462515
  REGION 1..447: note = Bit score of 1036.7 for HMM based on sequences of Figure 3
  REGION 1..447: note = Functional Homolog Of SEQ ID NO. 117
MEPRRSVLLLALAVAAALSVAVAYDPLDPNGNITIKWDIMSWTPDGYVAVVTINNFQTYRQITAPGWTVGWTWAKREVIWSMVGAQATEQGDCSRFKANIPHCCKRTPAVVDLLPGVPYNQQIANCCRGGVVSAYGQDPATAVAAFQVSVGQAGTTNRTVKVPKNFTLLGPGPGYTCGPGKVVPSTVFLTPDRRRKTQALMTWNVTCTYSQHLASKYPSCCVSFSSFYNDTIVPCAKCACGCEHKTCVQGDSKRLAVTGKHAHTAAAVRGQHRDKEAPLLQCTTHMCPVRVHWHVKLNYKEYWRAKIAITNFNYHMNYTQWTLVAQHPNLDNITEVFSFGYKPVVSYGSINDTAMFYGLKYFNDHLMQAGPYGNVQSEVLMRKDASTFTFRQGWAFPRKVYFNGDECQMPPPDAYPYLPNSAPPTAAASLGGAAAAAVVVLLGMIVA

SEQ ID NO: 143 - DNA, 1529 bp, Sorghum bicolor
  misc_feature 1..1529: note = Ceres Clone ID no. 570485
  misc_feature 1..1529: note = Encodes the peptide sequence at SEQ ID NO. 144
  source 1..1529: mol_type = unassigned DNA
atctgcgccttctggtgagagtacgtgtgttggttgttcttgcaggcacttgcacgcgtggtcaccatggagctgccccacgccgcgctcgcgctgatcgtcgccgcggccgccacgctctccgtcgcagtggcctacgacccgctggatcccaacgggaacatcaccatcaaatgggacgttctctcgtggacgccagacggatacgtcgcgacggtgacgatcaacaacttccagacgtaccggcagatcatggcgccggggtggacggtggggtggacgtgggcgaagcgggaggtgatctggtccatggtgggcgcgcaggccacggagcagggcgactgctccaagttcaaggccaacctcccgcactcgtgcaagcgcacccccgccgtcgtcgacctgctcccgggcgtgccctacaaccagcagatcgccaactgctgccgcggcggcgtcgtctccgcctacggccaggacccgtccggcgccgtgtcctccttccaggtcagcgtcggccaggccggcaccaccaaccgcaccgtcaaggtccccaagaacttcaccctcctcggccccggcccaggctacacctgcggccccgccaaggtcgtcccctccaccgtcttcctcaccgccgaccaccgccgcaagacccaggccctcatgacgtggaacgtgacgtgcacctactcgcagcacctggcgtccaagtacccgacctgctgcgtctccttctcctccttctacaacgacaccatcgtgccctgcgccaagtgcgcgtgcggctgcgagcacaagacctgcgcccgcagcgagcgggactcgaagcggctcatgtcggcgtcggggaagagcagcgcgcacgcggtcaccgcggtgcgcgggcacgtgaaccggcagagcgcggcgccgctgctgcagtgcacgacccacatgtgccccgtgcgcgtccactggcacgtcaagctcaactaccacgactactggcgcgccaaggtgaccgtcaccaacttcaactaccgcaccaactacaccggctggacgctcgtcgcccagcaccccaacctcgacaacatcaccgaggtcttcagcttcgactacaagcccgtcgtctcctacggctccatcaatgatacggcgctgttctacgggatgaagttcttcaacgaccagctcatggaggcggggccgtacgggaacgtgcagtcggaggtgctgatgcgcaaggacgccagcacattcacgttcaggcaggggtgggcgttcccgcggaagatctacttcaacggcgacgagtgccggatgccgccgccggactcctacccttacctgcccaactccgcgccggcgtcgctcgtgagctccgcctccgtcgtcgtcgccttcttggttctactcatggcatgagcgtcggaggcggccatgatgttttgcctgtagatcataggagaacgttttgggcttcaaggttgagatcggtggtgttttaatctggatataattaaacgcaagtttttccccattac

SEQ ID NO: 144 - protein, 447 aa, Sorghum bicolor
  REGION 47..211: note = Pfam Name: Phytochel_synth Pfam Description: Phytochelatin synthetase-like
  REGION 1..447: note = Ceres Clone ID no. 570485
  REGION 1..447: note = Bit score of 1016.9 for HMM based on sequences of Figure 3
  REGION 1..447: note = Functional Homolog Of SEQ ID NO. 117
MELPHAALALIVAAAATLSVAVAYDPLDPNGNITIKWDVLSWTPDGYVATVTINNFQTYRQIMAPGWTVGWTWAKREVIWSMVGAQATEQGDCSKFKANLPHSCKRTPAVVDLLPGVPYNQQIANCCRGGVVSAYGQDPSGAVSSFQVSVGQAGTTNRTVKVPKNFTLLGPGPGYTCGPAKVVPSTVFLTADHRRKTQALMTWNVTCTYSQHLASKYPTCCVSFSSFYNDTIVPCAKCACGCEHKTCARSERDSKRLMSASGKSSAHAVTAVRGHVNRQSAAPLLQCTTHMCPVRVHWHVKLNYHDYWRAKVTVTNFNYRTNYTGWTLVAQHPNLDNITEVFSFDYKPVVSYGSINDTALFYGMKFFNDQLMEAGPYGNVQSEVLMRKDASTFTFRQGWAFPRKIYFNGDECRMPPPDSYPYLPNSAPASLVSSASVVVAFLVLLMA

SEQ ID NO: 145 - protein, 441 aa, Oryza sativa
  REGION 46..210: note = Pfam Name: Phytochel_synth Pfam Description: Phytochelatin synthetase-like
  REGION 1..441: note = Public GI ID no. 125586664
  REGION 1..441: note = Bit score of 1075.6 for HMM based on sequences of Figure 3
  REGION 1..441: note = Functional Homolog Of SEQ ID NO. 117
  source 1..441: note = Oryza sativa subsp. japonica
MELHRCSLLALLLAVTCSVAVAYDPLDPKGNITIKWDVISWTPDGYVAMVTMSNYQMYRQILAPGWTVGWSWAKKEVIWSIVGAQATEQGDCSKFKGGIPHSCKRTPAIVDLLPGVPYNQQIANCCKAGVVSAYGQDPAGSVSAFQVSVGLAGTTNKTVKLPTNFTLAGPGPGYTCGPATIVPSTVYLTPDRRRRTQALMTWTVTCTYSQQLASRYPTCCVSFSSFYNSTIVPCASRRNSGGGGGHSGGTECIMGDSKRALSAGVNTPRKDGAPLLQCTSHMCPIRVHWHVKLNYKDYWRAKIAITNFNYRMNYTQWTLVAQHPNLNNVTEVFSFQYKPLLPYGNINDTGMFYGLKFYNDLLMEAGPFGNVQSEVLMRKDYNTFTFSQGWAFPRKIYFNGDECKMPPPDSYPYLPNSAPIGPPRSVAAAASAILVVLLLVA

SEQ ID NO: 146 - protein, 458 aa, Picea sitchensis
  REGION 63..227: note = Pfam Name: Phytochel_synth Pfam Description: Phytochelatin synthetase-like
  REGION 1..458: note = Public GI ID no. 116788824
  REGION 1..458: note = Bit score of 967.3 for HMM based on sequences of Figure 3
  REGION 1..458: note = Functional Homolog Of SEQ ID NO. 117
MGFSDTNTNMRVQSRWCFTSGILLGLTLIIAFAFSPTGAYDPLDPNGNITIKWDIMSWTPDGYLAVVTINNFQQYRHIQSPGWTLGWTWAKKEVIWSMVGAQTTEQGDCSKYKGNIPHCCNKNPTVVDLLPGTPYNQQIANCCKGGVIASWAQDPVNAVSAFQVSVGNAGTTNTTVRLPKNFTLKAPGPGYTCGPAKKVRASKFLTTDGRRVTQALMTWNITCTYSQFLAQKTPSCCVSLTSFYNDTIVPCPACTCGCQNNITQPGTCVESDSPVLPSLLNTSPKNLAPLIQCTPHMCPIKIHWHVKLNYKEYWRVKVTITNFNYRMNYTQWNIVVQHPNFDNVTQLFSFNYKPLTPYGKINDTAMLWGVKYYNDMLMQAGEMGNVQSELLFQKDKQTFTFKQGWGFPRRVYFNGDDCVLPPPDAYPWLPNGSPSPRVGKVFLLIVSLVVSACLLAFL

SEQ ID NO: 147 - protein, 468 aa, Oryza sativa
  REGION 46..210: note = Pfam Name: Phytochel_synth Pfam Description: Phytochelatin synthetase-like
  REGION 1..468: note = Public GI ID no. 115453531
  REGION 1..468: note = Bit score of 1101.6 for HMM based on sequences of Figure 3
  REGION 1..468: note = Functional Homolog Of SEQ ID NO. 117
  source 1..468: note = Oryza sativa subsp. japonica
MELHRCSLLALLLAVTCSVAVAYDPLDPKGNITIKWDVISWTPDGYVAMVTMSNYQMYRQILAPGWTVGWSWAKKEVIWSIVGAQATEQGDCSKFKGGIPHSCKRTPAIVDLLPGVPYNQQIANCCKAGVVSAYGQDPAGSVSAFQVSVGLAGTTNKTVKLPTNFTLAGPGPGYTCGPATIVPSTVYLTPDRRRRTQALMTWTVTCTYSQQLASRYPTCCVSFSSFYNSTIVPCARCACGCGHDGYRGNGGGGKNARAGDGRSRRNSGGGGGHSGGTECIMGDSKRALSAGVNTPRKDGAPLLQCTSHMCPIRVHWHVKLNYKDYWRAKIAITNFNYRMNYTQWTLVAQHPNLNNVTEVFSFQYKPLLPYGNINDTGMFYGLKFYNDLLMEAGPFGNVQSEVLMRKDYNTFTFSQGWAFPRKIYFNGDECKMPPPDSYPYLPNSAPIGPPRSVAAAASAILVVLLLVA

SEQ ID NO: 148 - DNA, 1715 bp, Arabidopsis thaliana
  misc_feature 1..1715: note = Ceres Clone ID no. 17250
  misc_feature 1..1715: note = Encodes the peptide sequence at SEQ ID NO. 149
  source 1..1715: mol_type = unassigned DNA
aaaaaatgtctcattgcttctctcgttctaaaaaaaatcttgctgctatctctctataagtccactcctccttcaagcaaagcaccttcctcttctttttgctcctctgagattggtttaagattaaaccagacccatctaagggatctggaacaagcttcgtctctggttccactctgatcatcagagtattaaaaatggagtctttcttctccagatccacctccatcgtctccaaattgagtttcttggccttatggatcgtcttcttgatttcttcatcttcttttacttcgacagaagcatatgatgcgcttgatccagaaggcaacattacaattaaatgggatgttatgagctggactcctgatggctatgttgccgtggttacgatgttcaacttccagaaatacagacacattcaatctccaggatggacattaggttggaaatgggcaaagaaggaagttatatggagtatggttggagcacaaacaactgaacaaggtgattgttcaaagtacaaaggaaacataccacattgttgtaagaaggatccaacagttgtagacttgcttccagggactccttataatcagcagattgctaattgctgcaagggtggtgttatgaactcatgggttcaagaccctgccactgcggctagctccttccagattagtgttggtgctgctggaaccacaaacaaaaccgttagggtcccaagaaacttcactctcatgggacctggtccaggttacacttgtggtccagcaaagattgtcagaccaacaaaatttgtcacgactgacacacgcagaaccactcaagctatgatgacatggaacattacgtgcacatactcgcagttccttgctcaaagaactccaacttgctgtgtttctttatcttctttctacaatgaaaccattgttggatgtccaacttgtgcttgcggatgtcaaaacaacagaacagaatccggtgcctgcctcgacccggacacaccacacttagcctcggttgtgtcaccaccaacaaagaaaggaacggttttaccaccattagtgcaatgcacgagacacatgtgcccgatcagagtgcattggcatgtaaagcagaactacaaagagtattggcgtgtgaagatcacaatcacaaacttcaactatcgcttgaactacacacaatggaaccttgttgctcaacatccaaatctcgacaacatcactcaaatcttcagcttcaactacaaatctcttactccttacgctggactaaacgatacggcgatgttatggggagtgaagttctacaacgatttcttatcagaagcaggtcctcttgggaatgttcaatcagagattttgttccgtaaagaccaatcaaccttcacattcgagaaaggttgggcttttccacgaaggatttactttaatggagacaattgcgtcatgcctcctccagactcttacccttttcttcccaacggtggttcccggtcacaattctcattcgtcgccgccgtgctcctccctcttcttgtctttttcttcttctctgcctaatctcggatttacggttttgccactggtttgcttagggttacggtggagtggtataaacgtttatttatgattcttttgtgtcccacaaaaattataatcttttgatactttttaaaaatataaatagttttcaacttccttgttttt

SEQ ID NO: 149 - protein, 456 aa, Arabidopsis thaliana
  REGION 60..224: note = Pfam Name: Phytochel_synth Pfam Description: Phytochelatin synthetase-like
  REGION 1..456: note = Ceres Clone ID no. 17250
  REGION 1..456: note = Bit score of 954.5 for HMM based on sequences of Figure 3
  REGION 1..456: note = Functional Homolog Of SEQ ID NO. 117
MESFFSRSTSIVSKLSFLALWIVFLISSSSFTSTEAYDALDPEGNITIKWDVMSWTPDGYVAVVTMFNFQKYRHIQSPGWTLGWKWAKKEVIWSMVGAQTTEQGDCSKYKGNIPHCCKKDPTVVDLLPGTPYNQQIANCCKGGVMNSWVQDPATAASSFQISVGAAGTTNKTVRVPRNFTLMGPGPGYTCGPAKIVRPTKFVTTDTRRTTQAMMTWNITCTYSQFLAQRTPTCCVSLSSFYNETIVGCPTCACGCQNNRTESGACLDPDTPHLASVVSPPTKKGTVLPPLVQCTRHMCPIRVHWHVKQNYKEYWRVKITITNFNYRLNYTQWNLVAQHPNLDNITQIFSFNYKSLTPYAGLNDTAMLWGVKFYNDFLSEAGPLGNVQSEILFRKDQSTFTFEKGWAFPRRIYFNGDNCVMPPPDSYPFLPNGGSRSQFSFVAAVLLPLLVFFFFSA

SEQ ID NO: 150 - DNA, 1371 bp, Arabidopsis thaliana
  misc_feature 1..1371: note = Ceres Annot ID no. 1363625
  misc_feature 1..1371: note = Encodes the peptide sequence at SEQ ID NO. 151
  source 1..1371: mol_type = unassigned DNA
atggagtctttcttctccagatccacctccatcgtctccaaattgagtttcttggccttatggatcgtcttcttgatttcttcatcttcttttacttcgacagaagcatatgatgcgcttgatccagaaggcaacattacaatgaaatgggatgttatgagctggactcctgatggctatgttgccgtggttacgatgttcaacttccagaaatacagacacattcaatctccaggatggacattaggttggaaatgggcaaagaaggaagttatatggagtatggttggagcacaaacaactgaacaaggtgattgttcaaagtacaaaggaaacataccacattgttgtaagaaggatccaacagttgtagacttgcttccagggactccttataatcagcagattgctaattgctgcaagggtggtgttatgaactcatgggttcaagaccctgccactgcggctagctccttccagattagtgttggtgctgctggaaccacaaacaaaaccgttagggtcccaagaaacttcactctcatgggacctggtccaggttacacttgtggtccagcaaagattgtcagaccaacaaaatttgtcacgactgacacacgcagaaccactcaagctatgatgacatggaacattacgtgcacatactcgcagttccttgctcaaagaactccaacttgctgtgtttctttatcttctttctacaatgaaaccattgttggatgtccaacttgtgcttgcggatgtcaaaacaacagaacagaatccggtgcctgcctcgacccggacacaccacacttagcctcggttgtgtcaccaccaacaaagaaaggaacggttttaccaccattagtgcaatgcacgagacacatgtgcccgatcagagtgcattggcatgtaaagcagaactacaaagagtattggcgtgtgaagatcacaatcacaaacttcaactatcgcttgaactacacacaatggaaccttgttgctcaacatccaaatctcgacaacatcactcaaatcttcagcttcaactacaaatctcttactccttacgctggactaaacgatacggcgatgttatggggagtgaagttctacaacgatttcttatcagaagcaggtcctcttgggaatgttcaatcagagattttgttccgtaaagaccaatcaaccttcacattcgagaaaggttgggcttttccacgaaggatttactttaatggagacaattgcgtcatgcctcctccagactcttacccttttcttcccaacggtggttcccggtcacaattctcattcgtcgccgccgtgctcctccctcttcttgtctttttcttcttctctgcctaa

SEQ ID NO: 151 - protein, 456 aa, Arabidopsis thaliana
  REGION 60..224: note = Pfam Name: Phytochel_synth Pfam Description: Phytochelatin synthetase-like
  REGION 1..456: note = Ceres Annot ID no. 1363625
  REGION 1..456: note = Bit score of 951.5 for HMM based on sequences of Figure 3
  REGION 1..456: note = Functional Homolog Of SEQ ID NO. 117
MESFFSRSTSIVSKLSFLALWIVFLISSSSFTSTEAYDALDPEGNITMKWDVMSWTPDGYVAVVTMFNFQKYRHIQSPGWTLGWKWAKKEVIWSMVGAQTTEQGDCSKYKGNIPHCCKKDPTVVDLLPGTPYNQQIANCCKGGVMNSWVQDPATAASSFQISVGAAGTTNKTVRVPRNFTLMGPGPGYTCGPAKIVRPTKFVTTDTRRTTQAMMTWNITCTYSQFLAQRTPTCCVSLSSFYNETIVGCPTCACGCQNNRTESGACLDPDTPHLASVVSPPTKKGTVLPPLVQCTRHMCPIRVHWHVKQNYKEYWRVKITITNFNYRLNYTQWNLVAQHPNLDNITQIFSFNYKSLTPYAGLNDTAMLWGVKFYNDFLSEAGPLGNVQSEILFRKDQSTFTFEKGWAFPRRIYFNGDNCVMPPPDSYPFLPNGGSRSQFSFVAAVLLPLLVFFFFSA

SEQ ID NO: 152 - protein, 451 aa, Oryza sativa
  REGION 45..209: note = Pfam Name: Phytochel_synth Pfam Description: Phytochelatin synthetase-like
  REGION 1..451: note = Public GI ID no. 75133694
  REGION 1..451: note = Bit score of 1006.3 for HMM based on sequences of Figure 3
  REGION 1..451: note = Functional Homolog Of SEQ ID NO. 117
  source 1..451: note = Oryza sativa subsp. japonica
MAVLGSLLLLILAATLSVAVAYDPLDPNGNITIKWDVMSWTPDGYVAMVTINNYQTYRQIMAPGWTVGWTWARQEVIWSMVGAQATDQGDCSRFKANLPHCCRRTPAVVDLLPGVPYNQQIANCCRGGVLPAYGQAPSAAAAAFQVSVGQAGTTNRTVRLPRNFTLLGPGPGYTCGRARVVPSTVFLTADRRRKTQALMTWNVTCTYSQHLASKYPSCCVSFSSFYNDTIVPCAKCACGCDAHKPCVRSERDGKRLAVTGKKHDANANAHGRGNGVAAAAMAAPLLQCTTHMCPVRVHWHVKLNYREYWRAKITIVNFNYRMNYTGWTLVAQHPNLDNITEVFSFDYKPVVSYGSINDTAMFYGLKYFNDQLMEAGPHGNVQSEVLMRKDARTFTFRQGWAFPRKVYFNGDECQMPPPDSYPYLPNAAPPAAASLVGSAVAMAALVFFLMA

SEQ ID NO: 153 - protein, 469 aa, Vitis vinifera
  REGION 60..224: note = Pfam Name: Phytochel_synth Pfam Description: Phytochelatin synthetase-like
  REGION 1..469: note = Public GI ID no. 147780878
  REGION 1..469: note = Bit score of 962.8 for HMM based on sequences of Figure 3
  REGION 1..469: note = Functional Homolog Of SEQ ID NO. 117
MGFCLSLISRSISSFCGCTILLLFLLSCSCFTSTEAYDALDPNGNITIKWDIMSWTPDGYVAVVTMYNFQQYRHIQSPGWSLQWTWAKKEVIWSMLGGQTTEQGDCSRFKGNVPHCCKKDPTVVDLLPGTPYNQQIANCCKGGVVSSWVQDPANAASSFQVSVGSAGTTNKTVRVPKNFTLKAPGPGYTCGPAKIVKPTRFVTQDGRRVTQALMTWNVTCTYSQFLSQKTPTCCVSLSSFYNDTIVPCPTCTCGCQNNITQPGSCVEEDSPYLASVVSGSGKNSYTPLVQCTKHMCPIRVHWHVKLSYKEYWRVKVTITNFNYRMNYTQWNLVVQHPNFDNLTQIFSFNYKSLTPYAAINDTAMLWGVKFYNDLLVQAGPLGNVQSELLFRKDKSTFTFEKGWAFPRRIYFNGDNCVMPPPDSYPWLPNATSRTSTSLLTLIMVLLSALLLYAHGYDNFIGKFYMQYAK

SEQ ID NO: 154 - protein, 456 aa, Vitis vinifera
  REGION 60..224: note = Pfam Name: Phytochel_synth Pfam Description: Phytochelatin synthetase-like
  REGION 1..456: note = Public GI ID no. 157341291
  REGION 1..456: note = Bit score of 964.1 for HMM based on sequences of Figure 3
  REGION 1..456: note = Functional Homolog Of SEQ ID NO. 117
MGFCLSLISRSISSFCGCTILLLFLLSCSCFTSTEAYDALDPNGNITIKWDIMSWTPDGYVAVVTMYNFQQYRHIQSPGWSLQWTWAKKEVIWSMLGGQTTEQGDCSRFKGNVPHCCKKDPTVVDLLPGTPYNQQIANCCKGGVVSSWVQDPANAASSFQVSVGSAGTTNKTVRVPKNFTLKAPGPGYTCGPAKIVKPTRFVTQDGRRVTQALMTWNVTCTYSQFLSQKTPTCCVSLSSFYNDTIVPCPTCTCGCQNNITQPGSCVEEDSPYLASVVSGSGKNSYTPLVQCTKHMCPIRVHWHVKLSYKEYWRVKVTITNFNYRMNYTQWNLVVQHPNFDNLTQIFSFNYKSLTPYAAINDTAMLWGVKFYNDLLVQAGPLGNVQSELLFRKDKSTFTFEKGWAFPRRIYFNGDNCVMPPPDSYPWLPNATSRTSTSLLTLIMVLLSALLLLNAHV

SEQ ID NO: 155 - protein, 448 aa, Phaseolus vulgaris
  REGION 53..217: note = Pfam Name: Phytochel_synth Pfam Description: Phytochelatin synthetase-like
  REGION 1..448: note = Public GI ID no. 38194916
  REGION 1..448: note = Bit score of 965.0 for HMM based on sequences of Figure 3
  REGION 1..448: note = Functional Homolog Of SEQ ID NO. 117
MGFSLLPKATPCILLLVLLYCTCFTSTDAYDPLDPNGNITIKWDIITWTPDGYVAVVTMNNFQQYRHIASPGWRLGWTWAKKEVIWSMMGGQTTEQGDCSKFKAGIPHCCKKDPTVVDLLPGTPYNQQIANCCKGGVLGSWVQDPTNAVSSFQVSVGRAGTTNKTVKVPKNFTLSAPGPGYTCGPAKIVKPTQFIQADKRRVTQALMTWNVTCQYSQFLAQKTPSCCVSLSSFYNDTIVPCPTCACGCQGNSSLSGSCVNSQTPHLASVVSGSGKNNLSPLVQCTSHMCPVRIHWHVKVNYKEYWRVKVTITNFNYRMNYSEWNMVVQHPNFDNLTQLFSFNYKSLTPYGSINDTAMLWGVKFYNDFLSQAGPNGNVQSELLFRKDKATFTFDKGWAFPRRIYFNGDNCVMPPPDAYPWLPNAGSRQEVSLFALVIAYLVALVFYAHA

SEQ ID NO: 156 - protein, 456 aa, Vitis vinifera
  REGION 60..224: note = Pfam Name: Phytochel_synth Pfam Description: Phytochelatin synthetase-like
  REGION 1..456: note = Public GI ID no. 157356291
  REGION 1..456: note = Bit score of 962.1 for HMM based on sequences of Figure 3
  REGION 1..456: note = Functional Homolog Of SEQ ID NO. 117
MEFFFTSIARSITKLSSYAILLVLLFSCSIFTSTEAYDSLDPEGNITIKWDVMSWTPDGYVAVVTMFNFQQYRHIQAPGWSLGWSWAKKEVIWSMMGGQTTEQGDCSRFKGNVPHCCKKDPTVVDLLPGTPYNQQIANCCKGGVINSWVQDPANAASSFQVSVGAAGTTNKTVKLPKNFTLRAPGPGYTCGPAKIVKPTKFTTADQRRVTQALMTWNVTCTYSQFLAQKTPTCCVSLSSFYNNTIVSCPTCTCGCQNNLTHPGSCVDPNNPYLASVVEGSGKTSYQPLVQCTSHMCPIRVHWHVKLNYKDYWRVKITITNFNYRMNYTQWNLVVQHPNFDNLTQIFSFNYKSLTPYAAINDTAMLWGVKFYNDLLSQAGPLGNVQSELLFRKDKATFTFDKGWAFPRRIYFNGDNCVMPPPDAYPWLPNASSRPTVSLLYSILTILAVSVIVLAYA

SEQ ID NO: 157 - DNA, 1834 bp, Gossypium hirsutum
  misc_feature 1..1834: note = Ceres Clone ID no. 1883580
  misc_feature 1..1834: note = Encodes the peptide sequence at SEQ ID NO. 158
  source 1..1834: mol_type = unassigned DNA
ataatttaaaagaaaaaaggcgttttacagtgagattaaagtgttccactacttaaactcaaagtcttaaactttcgtgtcatgtcctgttggacgaaaaagctactcatctccgttcttctctctgagtcttccctgtctgccacagatcttgaaccgaagtcaataacaaaagaagactcctaaaatcctacagaaatgtctaatctttttttgttcattgctagatctttcttcaacctaagctctttcagcgtcttgcttctgtttttgctctctttctcaagtttcactgcaacagaagcctatgatcctttggatcctaatggaaatatcacaatcaaatgggatatcatgagttggactgctgatggctatgttgcagttgtcacaatctttaacttccagcagtaccgtcacatccaagcaccagggtggacattaggttggaaatggtctaagaaggaggtgatttggagtatgatgggaggacaaacaactgaacaaggggattgttcaagattcaaagggaacattccacattgttgtaagaaggacccaacagtcgtggatttattgccaggaacaccttataatcagcagattgcgaattgctgtaaagggggagtgctaaactcatgggtacaagatccagctacggcagcaagctcattccaggtgagtgtggggcaagctggaactacaaacaagacagttagagttccaaaaaacttcactttgaaggcaccagggcccggttatacttgtggtccagcgaaaattgtgaaacccagtagatttgttaccgcggacaaaagaagagtcacacaagctttgatgacttggaatgttacttgcacgtattcacaatttctagctcagaaaacacctacttgttgcgtctctctctcatcattctataatgaaaccatagtaccttgcccgcaatgtgcttgtggctgccaaaatacttctcagcctgggagctgtgtagaccccaaagctccgcatatagcatcggttgttccaagtacagggaagaataactatgcacctttggtccaatgtacaagtcatatgtgtccggtccgagttcattggcatgttaagctaaactacaaggagtattggcgggttaaggtcacaattactaatttcaattataatatgaactatacacagtggaacttagttgtgcaacatcccaacttcgacaatctcacccagattttcagctttaactacaagtctttaactccgtatactgcaataaatgatactgccatgttatggggtgttaaatttttcaacgatttgctttcccaagctggtcagctcggtaatgtgcagtcagagctacttttccgaaaggacaaagcaactttcacttttgagaagggttgggctttcgctcgaagaatctacttcaatggagataattgtgttatgccaccgcccgacgcctatccttggttgcctaacggcagttcccatcagcttatctccacacttagtttgttgacaactctcttggcagcaatggcatttttattgggatatgcataaagttcaaccatttttatactgggaaatctggtatgctccaaaattttgactgaatcagttcgatgtagaatgtacggcgtgagaagttgcagtttgtgtcagttagaggaagtcaatgtgcagtggtgtcgttttaatgtatggtcagtgaattcactcgtgctgttgtatgtatgcatgttcgtttatgtacttaaaccaaaaacaatgttgattgtagaattcccacgatattttattacagtagtaacagacataaatcattgac

SEQ ID NO: 158 - protein, 455 aa, Gossypium hirsutum
  REGION 60..224: note = Pfam Name: Phytochel_synth Pfam Description: Phytochelatin synthetase-like
  REGION 1..455: note = Ceres Clone ID no. 1883580
  REGION 1..455: note = Bit score of 955.3 for HMM based on sequences of Figure 3
  REGION 1..455: note = Functional Homolog Of SEQ ID NO. 117
MSNLFLFIARSFFNLSSFSVLLLFLLSFSSFTATEAYDPLDPNGNITIKWDIMSWTADGYVAVVTIFNFQQYRHIQAPGWTLGWKWSKKEVIWSMMGGQTTEQGDCSRFKGNIPHCCKKDPTVVDLLPGTPYNQQIANCCKGGVLNSWVQDPATAASSFQVSVGQAGTTNKTVRVPKNFTLKAPGPGYTCGPAKIVKPSRFVTADKRRVTQALMTWNVTCTYSQFLAQKTPTCCVSLSSFYNETIVPCPQCACGCQNTSQPGSCVDPKAPHIASVVPSTGKNNYAPLVQCTSHMCPVRVHWHVKLNYKEYWRVKVTITNFNYNMNYTQWNLVVQHPNFDNLTQIFSFNYKSLTPYTAINDTAMLWGVKFFNDLLSQAGQLGNVQSELLFRKDKATFTFEKGWAFARRIYFNGDNCVMPPPDAYPWLPNGSSHQLISTLSLLTTLLAAMAFLLGYA

SEQ ID NO: 159 - DNA, 1877 bp, Gossypium hirsutum
  misc_feature 1..1877: note = Ceres Clone ID no. 1848658
  misc_feature 1..1877: note = Encodes the peptide sequence at SEQ ID NO. 160
  source 1..1877: mol_type = unassigned DNA
aataaccgacagcttgcacccatatggatggagcatgtacctctctgtctcagactctgtactaaattgcttttataagcttcacttgcaactcaacagctgacctctctcttctccatttgatgtgagaaggatctttctttctttattctgcacatcttaaccttaaccacatcataagatagagatctcttaaacgatcgagttatggagactgtcttttcagcagcaagtagatccatttccaagctcattagcttcaccgctttgcttcttttcttgttttcctgctctactttcacttctactgaagcttatgatgcgcttgatccaactggcaatatcactatcaaatgggacgtaataagttggaccccagatggctatgttgctgttgttacaatgtacaatttccaacagtatcgccatattcaggcacctggttggacattggggtggacatgggccaaaaaggaagtaatctggagcatgatgggaagccaaaccacggaacaaggggattgttcaaaatacaaaggaaacgtccctcattgctgtaaaaaggatcccacagttgtggatttattgcctggaactccttataaccagcagattgcaaattgctgcaaaggcggtgtattaaattcatgggttcaagacccagccaatgcagcaagctcatttcaggttagtgtgggcgctgcaggaacaacgaacaaaactgtgagagtgcctagaaactttaccctgaaagcaccaggtccaggatatacttgtgggcctgccaagattgtgaaacccactaaattcataacggctgataaaaggagaataactcaagctatgatgacatggaatgttacatgcacatattcccaatttctggctcaaaagactcctacatgttgcgtctcgctctcttccttctataataacactatcgtgaattgcccgacatgtgcttgtggctgtcagaataactcaactgaatctgggagttgtgtaagcgaaaggtcttcacatttagcttcagctgttccgggcaaatctaccaatgcaccacctctgcttcagtgtacgagccatatgtgtccagttcgaattcactggcatgttaagctcaactacaaggaatactggcgtgtgaagatcacaatcaccaatttcaattacgcattgaactacagtcagtggaatctagttgtgcaacaccccaactttgacaatcttacacaacttttcagcttcaattacaaaccattaactccttatgctggcttaaatgatactgccatgttatggggacttaagttttataatgatttcctcaacgaagccggtcctcttgggaatgtgcagtcagaactattattcagaaaagatgcatcaacttttacttttgaaaagggatgggcttttccacggagaatatatttcaatggtgataactgtgtcatgccacctcccgatgcctacccttggttgccgaatactggtttgaagccagttatctctctgtttcagccagtcatgacgatcttggcatcatgtgttttcttatgggctaatatgtgatgaatgctgtctgcggaaaccgctaaaactatttgttcgacatcctgcaatttgcatctggtttcatattatcacactgaagcttttggtgatcgattcaatggtgttggaatagtttggtgcggcaatgtaacacgctaaagagtggatcaaggtgcacaatctctggtccctatagcatgtggtgtattatttatatgttggggtttgtaatttacaccatttccttttggagttaactgctttgttgtatgtttcattcacatcatacacatgatcgatttatttgtagaatatccttg

SEQ ID NO: 160 - protein, 455 aa, Gossypium hirsutum
  REGION 60..224: note = Pfam Name: Phytochel_synth Pfam Description: Phytochelatin synthetase-like
  REGION 1..455: note = Ceres Clone ID no. 1848658
  REGION 1..455: note = Bit score of 946.6 for HMM based on sequences of Figure 3
  REGION 1..455: note = Functional Homolog Of SEQ ID NO. 117
METVFSAASRSISKLISFTALLLFLFSCSTFTSTEAYDALDPTGNITIKWDVISWTPDGYVAVVTMYNFQQYRHIQAPGWTLGWTWAKKEVIWSMMGSQTTEQGDCSKYKGNVPHCCKKDPTVVDLLPGTPYNQQIANCCKGGVLNSWVQDPANAASSFQVSVGAAGTTNKTVRVPRNFTLKAPGPGYTCGPAKIVKPTKFITADKRRITQAMMTWNVTCTYSQFLAQKTPTCCVSLSSFYNNTIVNCPTCACGCQNNSTESGSCVSERSSHLASAVPGKSTNAPPLLQCTSHMCPVRIHWHVKLNYKEYWRVKITITNFNYALNYSQWNLVVQHPNFDNLTQLFSFNYKPLTPYAGLNDTAMLWGLKFYNDFLNEAGPLGNVQSELLFRKDASTFTFEKGWAFPRRIYFNGDNCVMPPPDAYPWLPNTGLKPVISLFQPVMTILASCVFLWANM

SEQ ID NO: 161 - DNA, 1362 bp, Populus balsamifera
  misc_feature 1..1362: note = Ceres Annot ID no. 1450185
  misc_feature 1..1362: note = Encodes the peptide sequence at SEQ ID NO. 162
  source 1..1362: mol_type = unassigned DNA; note = Populus balsamifera subsp. trichocarpa
atgggctttcttgtctctcccatgatgagtttgttctcaaaattcactgtcctgctgctttttgtgctttggtgcgctagttttacttcaacagaagcctatgatcctcttgaccctactgggaatattacaatcaaatgggacatcataagctggactgctgatggctatgtcgctgttgtcacgatttacaacttccagcagtatcgtcacattcaagcaccaggatggtcactgggatggacatgggcaaagaaggaggtaatatggagcatgctgggaggccaagcaaccgaccaaggagattgttcaaaattcaaaggaaacgttccacattgttgtaaaaagagtccgacggttgtagatttattgccaggaactccttataaccagcagactgcaaattgctgcaaggggggagttatcagctcatgggcgcaagatccagccaatgcagcaagctccttccagcttagcgtgggttcagctggaaccagtaacaaaacagtgagattaccaaaaaacttcactctgaaggcaccaggacctggttatacttgtgctcgtgcaaaaattgttaagcctactagatttatgtctacagataaaaggagaatcactcaagctttgatgacatggaacgttacttgcacatattcacaattcctggctcagaagactcctagttgctgtgtctccctctcatcattctacaacgacactatagttccttgtccaaaatgcacctgtggctgccaaagaaacaattcggattcggggggttgtgttgatccaaatgcaccacatttagcttcggttgtttcgagtctagggaataacaaccctatgcctcttgtccaatgcacaagtcacatgtgcccgatcagagttcactggcatgttaagcttaactacaagcaatactggcgcgttaaggtcacaattacaaatttcaattataacatgaactatacgcaatggaacttagttgtgcaacaccccaactttgacaatctgacccagagtttcagttttaactaccagtcattatctccttattcagctattaatgatactgccatgttgtggggagtaaagttctacaatgacttgcttatgcaagccggtcgttctggtaatgttcagtcagagctactttttcgaaaggacaagtcaacttttacctttgataaaggctgggccttccctcggagaatctatttcaatggtgacaattgcgttatgcctcctccagatgcgtatccatggttgcctaatgcaagttcacgccagcttacttcaccgcttatgctaatgatagccttcttttctgttttggctttcttatatggatacgcgtag

SEQ ID NO: 162 - protein, 453 aa, Populus balsamifera
  REGION 57..221: note = Pfam Name: Phytochel_synth Pfam Description: Phytochelatin synthetase-like
  REGION 1..453: note = Ceres Annot ID no. 1450185
  REGION 1..453: note = Bit score of 940.5 for HMM based on sequences of Figure 3
  REGION 1..453: note = Functional Homolog Of SEQ ID NO. 117
  source 1..453: note = Populus balsamifera subsp. trichocarpa
MGFLVSPMMSLFSKFTVLLLFVLWCASFTSTEAYDPLDPTGNITIKWDIISWTADGYVAVVTIYNFQQYRHIQAPGWSLGWTWAKKEVIWSMLGGQATDQGDCSKFKGNVPHCCKKSPTVVDLLPGTPYNQQTANCCKGGVISSWAQDPANAASSFQLSVGSAGTSNKTVRLPKNFTLKAPGPGYTCARAKIVKPTRFMSTDKRRITQALMTWNVTCTYSQFLAQKTPSCCVSLSSFYNDTIVPCPKCTCGCQRNNSDSGGCVDPNAPHLASVVSSLGNNNPMPLVQCTSHMCPIRVHWHVKLNYKQYWRVKVTITNFNYNMNYTQWNLVVQHPNFDNLTQSFSFNYQSLSPYSAINDTAMLWGVKFYNDLLMQAGRSGNVQSELLFRKDKSTFTFDKGWAFPRRIYFNGDNCVMPPPDAYPWLPNASSRQLTSPLMLMIAFFSVLAFLYGYA

SEQ ID NO: 163 - protein, 442 aa, Arabidopsis thaliana
  REGION 50..214: note = Pfam Name: Phytochel_synth Pfam Description: Phytochelatin synthetase-like
  REGION 1..442: note = Public GI ID no. 13477083
  REGION 1..442: note = Bit score of 931.3 for HMM based on sequences of Figure 3
  REGION 1..442: note = Functional Homolog Of SEQ ID NO. 117
MNILFSRFSFLLLFLCSWTNLSNTEAYDALDPYGNITIKWDIMSWTGDGYVAVVTIFNFQQYRHIEAPGWQLGWSWMKKEVIWSMVGGQATEQGDCSKFKGNIPHCCKKTPAIVDLLPGTPYNQQISNCCRGGVISAWAQDPATAISSFQISVGQSGTTNTTVRAPRNITLKAPGPGYTCGPAKLVKPSRFISADKRRKTQSLLTWNITCTYSQFLARKTPTCCVSLSAFYNETIVPCPTCSCGCQNSSQAGTCVDCDSPKIASVVPALGKNNLEPLLQCTQHMCPIRVHWHVKTSYKEYWRVKVAITNFNYNMNYSQWNLVVQHPNFDNLTKLFSFNYKPLNPYLNINDTAMLWGIKFYNDFLSQAGPVGNVQSELLFQKNPLEFTFEKGWAFPRRIYFNGDNCVMPPPDSYPWLPNASPNIATSPFVILLITFLSVLILM

SEQ ID NO: 164 - protein, 457 aa, Oryza sativa
  REGION 60..224: note = Pfam Name: Phytochel_synth Pfam Description: Phytochelatin synthetase-like
  REGION 1..457: note = Public GI ID no. 115463639
  REGION 1..457: note = Bit score of 955.6 for HMM based on sequences of Figure 3
  REGION 1..457: note = Functional Homolog Of SEQ ID NO. 117
  source 1..457: note = Oryza sativa subsp. japonica
MAVGGAGSSRSVAPCCCCAVLLAAALLFSAPATTEAYDALDPNGNITIKWDVMSWTPDGYVAVVTMFNYQQFRHIQAPGWQLGWTWAKKEVIWSMVGAQTTEQGDCSKFKGGTPHCCKKDPTVVDLLPGTPYNMQIANCCKAGVINTFNQDPSNAASSFQISVGLAGTTNKTVKLPKNFTLKAPGPGYTCGRAMIVRPTKFFTGDGRRATQALMTWNVTCTYSQFLAQKTPSCCVSLSSFYNDTIVNCPTCSCGCQNNGTSPGSCVNENSPYLQSAIDGPGKWTGQPLVQCTSHMCPIRIHWHVKLNYKEYWRVKITITNFNYRMNYTQWNLVAQHPNFNNITQLFSFNYKPLTPYGSKINDTAMFWGVKFYNDLLMQAGPLGNAQSELLLRKDSKDFTFDKGWAFPHRVYFNGDNCVMPPPDAYPWLPNASPLTKQPLTLSVLVFSIVLATLLAYA

SEQ ID NO: 165 - DNA, 1503 bp, Arabidopsis thaliana
  misc_feature 1..1503: note = Ceres Clone ID no. 98007
  misc_feature 1..1503: note = Encodes the peptide sequence at SEQ ID NO. 166
  source 1..1503: mol_type = unassigned DNA
cttctctttcctctctctcacacacatcttcgagaagtttccgccggcgggagagatcaaagacaactgctgatcagaaatcagagatcagagatatgaacattctcttctccagattctcctttttgcttctgtttctctgttcttggaccattttcactttcaccacaacagaagcttatgatgcacttgatccatatggaaacattactataaaatgggatattatgagctggactggtgatggttatgtggctgttgtaacaatctttaatttccaacaataccgtcacatagaggcgccggggtggcaattaggatggagttggatgaagaaggaagtaatatggagtatggttggtggtcaagcaacagaacaaggagattgttctaagtttaagggtaacattcctcattgctgcaagaaaactccggctatcgttgatttgttaccgggaactccttataaccagcagatatccaactgttgtagagggggtgtgattagcgcgtgggcacaagaccccgcaaccgcgatttcttcgtttcagatcagtgttggccagtctggaacaactaatactacggttagagcacctaggaatataactttgaaggctccaggacctggttacacttgcgggcctgcaaaactcgttaagccgagtagattcatttccgcggataaacgaagaaagactcagtctttgcttacatggaacattacttgcacatattcgcagtttctagcacggaaaactccgacttgttgtgtctcactctcagccttctacaatgaaactatagtaccatgtccaacttgttcttgtggatgtcaaaatagttctcaagctggtacatgtgttgaccctaaaatagcttcagtagtaccagccttagggaagaacaacctcgaacctctcttgcaatgtacgcaacatatgtgtcccattcgagttcattggcatgtaaaaactagctacaaagagtactggagagtgaaggttgccatcacaaactttaactacaatatgaactactctcagtggaacttagtctttcagcatcccaacttcgacaatctcactcagcttttcagtttcaactacaaaccgcttaatccttacttgaacataaatgacacggccatgctatggggaatcaagttctacaatgattttttaagccaagctggtccagtaggcaatgtacagtcagagcttctcttccaaaagaacccattggagttcacattcgagaaaggatgggcgtttccgaggcgcatatacttcaacggtgataactgcgttatgccacctccagactcttatccatggcttccaaacgctagtccaaacattgcaacctcgccatttgtcatacttctcatcactttcttatctgttttgattcttatgtaaatggatatctatataccgtcatggacatgtttggtgatgtttacattataagtgagtgtgttattaggaaatcattctttgc

SEQ ID NO: 166 - protein, 441 aa, Arabidopsis thaliana
  REGION 52..216: note = Pfam Name: Phytochel_synth Pfam Description: Phytochelatin synthetase-like
  REGION 1..441: note = Ceres Clone ID no. 98007
  REGION 1..441: note = Bit score of 914.3 for HMM based on sequences of Figure 3
  REGION 1..441: note = Functional Homolog Of SEQ ID NO. 117
MNILFSRFSFLLLFLCSWTIFTFTTTEAYDALDPYGNITIKWDIMSWTGDGYVAVVTIFNFQQYRHIEAPGWQLGWSWMKKEVIWSMVGGQATEQGDCSKFKGNIPHCCKKTPAIVDLLPGTPYNQQISNCCRGGVISAWAQDPATAISSFQISVGQSGTTNTTVRAPRNITLKAPGPGYTCGPAKLVKPSRFISADKRRKTQSLLTWNITCTYSQFLARKTPTCCVSLSAFYNETIVPCPTCSCGCQNSSQAGTCVDPKIASVVPALGKNNLEPLLQCTQHMCPIRVHWHVKTSYKEYWRVKVAITNFNYNMNYSQWNLVFQHPNFDNLTQLFSFNYKPLNPYLNINDTAMLWGIKFYNDFLSQAGPVGNVQSELLFQKNPLEFTFEKGWAFPRRIYFNGDNCVMPPPDSYPWLPNASPNIATSPFVILLITFLSVLILM

SEQ ID NO: 167 - DNA, 1326 bp, Arabidopsis thaliana
  misc_feature 1..1326: note = Ceres Annot ID no. 1326475
  misc_feature 1..1326: note = Encodes the peptide sequence at SEQ ID NO. 168
  source 1..1326: mol_type = unassigned DNA
atgaacattctcttctccagattctcctttttgcttctgtttctctgttcttggaccagtttcactttcaccacaacagaagcttatgatgcacttgatccatatggaaacattactataaaatgggatattatgagctggactggtgatggttatgtggctgttgtaacaatctttaatttccaacaataccgtcacattgaggcgccggggtggcaattaggatggagttggatgaagaaggaagtaatttggagtatggttggtggtcaagcaacagaacaaggagattgttctaagtttaagggtaacattcctcattgctgcaagaaaactccggctatcgttgatttgttaccgggaactccttataaccaacagatatcaaactgttgtagaggcggtgtgattagcgcgtgggcgcaagaccccgcaaccgcgatttcttcgtttcagattagtgttggccagtctggaacaactaatactacggttagagcacctaggaatataactttgaaggctccaggacctggttacacttgcgggcctgcaaaactcgttaagccgagtagattcatttccgcggataaacgaagaaagactcagtctttgcttacatggaacattacttgcacatattcgcagtttctagcacggaaaactccgacttgttgtgtctcactctcagccttctacaatgaaactatagtaccatgtccaacttgttcttgtggatgtcaaaatagttctcaagctggtacatgtgttgaccctaaaatagcttcagtagtaccagccttagggaagaacaacctcgaacctctcttgcaatgtacgcaacatatgtgtcccattcgagttcattggcatgtaaaaactagctacaaagagtactggagagtgaaggttgccatcacaaactttaactacaatatgaactactctcagtggaacttagtcgttcagcatcccaacttcgacaatctcactaagcttttcagtttcaactacaaaccgcttaatccttacttgaacataaatgacacggccatgctatggggaatcaagttctacaatgattttttaagccaagctggtccagtaggcaatgtacagtcagagcttctcttccaaaagaacccattggagttcacattcgagaaaggatgggcgtttccgaggcgcatatacttcaacggtgataactgcgttatgccacctccagactcttatccatggcttccaaacgctagtccaaacattgcaacctcgccatttgtcatacttctcatcactttcttatctgttttgattcttatgtaa

SEQ ID NO: 168 - protein, 441 aa, Arabidopsis thaliana
  REGION 52..216: note = Pfam Name: Phytochel_synth Pfam Description: Phytochelatin synthetase-like
  REGION 1..441: note = Ceres Annot ID no. 1326475
  REGION 1..441: note = Bit score of 916.0 for HMM based on sequences of Figure 3
  REGION 1..441: note = Functional Homolog Of SEQ ID NO. 117
MNILFSRFSFLLLFLCSWTSFTFTTTEAYDALDPYGNITIKWDIMSWTGDGYVAVVTIFNFQQYRHIEAPGWQLGWSWMKKEVIWSMVGGQATEQGDCSKFKGNIPHCCKKTPAIVDLLPGTPYNQQISNCCRGGVISAWAQDPATAISSFQISVGQSGTTNTTVRAPRNITLKAPGPGYTCGPAKLVKPSRFISADKRRKTQSLLTWNITCTYSQFLARKTPTCCVSLSAFYNETIVPCPTCSCGCQNSSQAGTCVDPKIASVVPALGKNNLEPLLQCTQHMCPIRVHWHVKTSYKEYWRVKVAITNFNYNMNYSQWNLVVQHPNFDNLTKLFSFNYKPLNPYLNINDTAMLWGIKFYNDFLSQAGPVGNVQSELLFQKNPLEFTFEKGWAFPRRIYFNGDNCVMPPPDSYPWLPNASPNIATSPFVILLITFLSVLILM

SEQ ID NO: 169 - protein, 473 aa, Oryza sativa
  REGION 45..231: note = Pfam Name: Phytochel_synth Pfam Description: Phytochelatin synthetase-like
  REGION 1..473: note = Public GI ID no. 115473243
  REGION 1..473: note = Bit score of 971.0 for HMM based on sequences of Figure 3
  REGION 1..473: note = Functional Homolog Of SEQ ID NO. 117
  source 1..473: note = Oryza sativa subsp. japonica
MAVLGSLLLLILAATLSVAVAYDPLDPNGNITIKWDVMSWTPDGYVAMVTINNYQTYRQIMAPGWTVGWTWARQEVIWSMVGAQATDQGDCSRFKANLPHCCRRTPAVVDLLPGVPYNQQIANCCRGGVLPAYGQAPSAAAAAFQVSVGQAGTTNRTVRLPRNFTLLGPGPGYTCGRARVVPSTVFLTADRRRKTQALSKLTTPSSSSPAPPLMMSCLCAVTWNVTCTYSQHLASKYPSCCVSFSSFYNDTIVPCAKCACGCDAHKPCVRSERDGKRLAVTGKKHDANANAHGRGNGVAAAAMAAPLLQCTTHMCPVRVHWHVKLNYREYWRAKITIVNFNYRMNYTGWTLVAQHPNLDNITEVFSFDYKPVVSYGSINDTAMFYGLKYFNDQLMEAGPHGNVQSEVLMRKDARTFTFRQGWAFPRKVYFNGDECQMPPPDSYPYLPNAAPPAAASLVGSAVAMAALVFFLMA

SEQ ID NO: 170 - DNA, 1575 bp, Arabidopsis thaliana
  misc_feature 1..1575: note = Ceres Annot ID no. 870466
  misc_feature 1..1575: note = Encodes the peptide sequence at SEQ ID NO. 171
  source 1..1575: mol_type = unassigned DNA
acttgtcagagacagaagattaaagaagaagaggcgtttctctctctttttttgcttcagaaaaaatggggtttttcttgtgttcctcttcttcaatcttcttcaagttcggaatctctataatctttctagtttctttctctggtttaactccttcagaagcttatgatcctttggacccgagtgggaacattactgtcaaatgggatatcataacctggactggagatggctatgtggcgactgtaacggtatataattttcagcaatatcgacacattcaagctccaggttggactcttggatggtcatgggcaaagagagaggttatatggggaatgaatggaggacaaaccacagaacaaggagattgttctaaattcaaaggaaccattcctcattgctgtaaaaagacaccttctgttgttgatctcttacctggatctccttacaatcagcagattgctaattgttgcagagggggtgtgcttaactcgtgggctcaagatcccgcaactgctgtttccgctttccagcttactgttggacaagctggaaccacaaataagacagttagggtacctaagaatttcactctcaaagctcctggaccgggatatacttgtagccccgcgaagattgtaaaaccgactagattcatcggtactgataaacgaagagttactcaagcattaatgacttggaatgtaacttgcacatactcgcagttcttagctcagaaaacaccaacttgctgtgtatctctttcatcgttttataacaagacaatagtttcttgtccaacatgctcttgtggatgcagaaacacttctcagccagggaattgtgtagacccaaaaggtccacggatagcatcagtcattccaaatccggggaagaacgcatatataccgcctctggtccaatgtacaaagcatatgtgtccagttagaatccactggcatgtgaaagtcaactacaaacagtactggagagttaaagtcaccatcacaaatttcaactacaacatgaactattcacagtggaatctcgtcgtgcagcatccgaatttcgacaatctaactcagacttttagcttcaactataaacctctgactccttatgcttccataaatgatactgggattctctggggaataaagttctacaatgatctgttgatgcaagctgggccatttggtaatgtacaatctgagctacttttccagaaagaagcatcagctttcacatttgagaaaggttgggcgtttccaagaagaatctatttcaatggagataactgtgtgatgcctcctcctgattcttacccttggctgcccaataccggctcgcacaaatcagtcggttccctgtttgcagcaatggccttgttactgattgtgttcctacatggaaacttgtaagaatcatcaagtgtagaattcttctgctgcagtttttcgaactgatataacccatcaagagagagttggtagcttagttttttgtgttctctcttgtctgtcctcttcctgtacaacgctttaatattagatggttaactagatccccttg

SEQ ID NO: 171 - protein, 452 aa, Arabidopsis thaliana
  REGION 57..221: note = Pfam Name: Phytochel_synth Pfam Description: Phytochelatin synthetase-like
  REGION 1..452: note = Ceres Annot ID no. 870466
  REGION 1..452: note = Bit score of 929.7 for HMM based on sequences of Figure 3
  REGION 1..452: note = Functional Homolog Of SEQ ID NO. 117
MGFFLCSSSSIFFKFGISIIFLVSFSGLTPSEAYDPLDPSGNITVKWDIITWTGDGYVATVTVYNFQQYRHIQAPGWTLGWSWAKREVIWGMNGGQTTEQGDCSKFKGTIPHCCKKTPSVVDLLPGSPYNQQIANCCRGGVLNSWAQDPATAVSAFQLTVGQAGTTNKTVRVPKNFTLKAPGPGYTCSPAKIVKPTRFIGTDKRRVTQALMTWNVTCTYSQFLAQKTPTCCVSLSSFYNKTIVSCPTCSCGCRNTSQPGNCVDPKGPRIASVIPNPGKNAYIPPLVQCTKHMCPVRIHWHVKVNYKQYWRVKVTITNFNYNMNYSQWNLVVQHPNFDNLTQTFSFNYKPLTPYASINDTGILWGIKFYNDLLMQAGPFGNVQSELLFQKEASAFTFEKGWAFPRRIYFNGDNCVMPPPDSYPWLPNTGSHKSVGSLFAAMALLLIVFLHGNL

SEQ ID NO: 172 - DNA, 1823 bp, Panicum virgatum
  misc_feature 1..1823: note = Ceres Clone ID no. 1806851
  misc_feature 1..1823: note = Encodes the peptide sequence at SEQ ID NO. 173
  source 1..1823: mol_type = unassigned DNA
ctcgcacccacaagaatagctcaaacccgcgtgcatgtctgcatccccgggcggacacggcgcgcgccagaagcctcgcatcgccatcgcgcatacaaactggcaggccagacaccacaggacgagagacagagaggaaacctctgcttctccctctgacccactcctcgttcttctgagctcctgttgccttcctccgcacggagagcagacacgccgagagcgatcagggcagggaggggtctgctgcttacttcctgagctctgccgggccgggccatggcgggacggcggacggcgcccctgcgcctgtgcgcctccgtcgcgctgctcgtcgtcgccgtctcctctctgacgccttcgtcagatgcatacgatccactcgatccgaatgggaacataacaatcaagtgggatgtaatgcagtggactccagatggctatgtggctgttgtttccctatacaattaccagcagtaccgccacatccaagcgccgggctggaaactcggatgggtttgggcaaagaaggagataatctgggcaatgaccggtggccaagccactgagcaaggcgattgctccaaattcaaaagcaacattccccattgctgcaagaaggatcctgaggttgtggacctgcttcctggcacaccttataacatgcagatcgccaactgctgcaagggaggagtcctcaccgcatgggcacaggaccctgacaatgctgtggcttcgttccaagtcagtgttggtcaggctgggacgaccaacaagactgtgaaggtgcccaagaatttcactctgaaggctcccgggccagggtatacctgcggccctgccaaactagtgaaacctactaagttcatatcgccggatgggagaagatcaactcaagcacacatgacttggaatgtgacctgtacatactcacagtttgttgcccaaagatctccaacctgctgtgtttcgctttcatcgttttacaacgacaccattgtcaactgcccaacatgctcttgtggatgccagaataacagcactgcaccaggaagctgtgtagagggtaattcaccttatctggcctctgtcgtgaacgatcctaacaagaacagcttggcacctctagtccaatgcacttctcacatgtgcccaataagagtgcattggcatgtcaaagtgaactacaaggagtactggagggtcaagatcaccgtgacaaacttcaactaccggatgaactactcgcagtggaacctcgttgcgcagcaccccaacttcgacaacctgactaccattttcagcttcaactacaaatctctgaacccctatggcgtaataaacgacaccgcgatgttatggggcatcaagtactacaacgatctgctgatgacggctgggccggacgggaatgttcagtctgagcttctgttccggaaggagccctccaccttcaccttccagaaaggctgggctttcccaagacgagtgtacttcaatggcgacaactgcgtgatgccgccgccggacgcgtacccatggctgcccaacgcctctccacggcagtcagcttcggttctcctcacatttgttgctgtttgggcagcattggcgatcctactggccaatccctagtgatgtagtacatgtttcacagaaagttttgacctgattgcattggatgctattgccttctgatcattgagtttcttgcgatggtgttcaaatgtacagttacgtactcaaggatgtacattcccgtacttgtaaattttagcaaagactgactggcgagaaataaagctgtttcctcggcatcatgc

SEQ ID NO: 173 - protein, 451 aa, Panicum virgatum
  REGION 55..219: note = Pfam Name: Phytochel_synth Pfam Description: Phytochelatin synthetase-like
  REGION 1..451: note = Ceres Clone ID no. 1806851
  REGION 1..451: note = Bit score of 944.6 for HMM based on sequences of Figure 3
  REGION 1..451: note = Functional Homolog Of SEQ ID NO. 117
MAGRRTAPLRLCASVALLVVAVSSLTPSSDAYDPLDPNGNITIKWDVMQWTPDGYVAVVSLYNYQQYRHIQAPGWKLGWVWAKKEIIWAMTGGQATEQGDCSKFKSNIPHCCKKDPEVVDLLPGTPYNMQIANCCKGGVLTAWAQDPDNAVASFQVSVGQAGTTNKTVKVPKNFTLKAPGPGYTCGPAKLVKPTKFISPDGRRSTQAHMTWNVTCTYSQFVAQRSPTCCVSLSSFYNDTIVNCPTCSCGCQNNSTAPGSCVEGNSPYLASVVNDPNKNSLAPLVQCTSHMCPIRVHWHVKVNYKEYWRVKITVTNFNYRMNYSQWNLVAQHPNFDNLTTIFSFNYKSLNPYGVINDTAMLWGIKYYNDLLMTAGPDGNVQSELLFRKEPSTFTFQKGWAFPRRVYFNGDNCVMPPPDAYPWLPNASPRQSASVLLTFVAVWAALAILLANP

SEQ ID NO: 174 - protein, 446 aa, Oryza sativa
  REGION 52..216: note = Pfam Name: Phytochel_synth Pfam Description: Phytochelatin synthetase-like
  REGION 1..446: note = Public GI ID no. 75133695
  REGION 1..446: note = Bit score of 926.5 for HMM based on sequences of Figure 3
  REGION 1..446: note = Functional Homolog Of SEQ ID NO. 117
  source 1..446: note = Oryza sativa subsp. japonica
MALLLLRMGVSVALLVAFFSSLIPSSEAYDPLDPNGNITIKWDVLQWTPDGYVAVVSLYNYQQYRHIQSPGWKLGWVWAKKEIIWAMNGGQATEQGDCSKFKSNIPHCCKKDPEIVDLLPGTPYNMQIANCCKGGVLNSWAQDPANAIASFQVSVGQAGTTNKTVRVPRNFTLKSPGPGYTCGSAKVVRPTKFFSQDGRRTTQAHMTWNVTCTYSQIVAQRSPTCCVSLSSFYNDTIVNCPTCSCGCQNNKPGSCVEGNSPYLASVVNTHNKDSLTPLVQCTSHMCPIRVHWHVKVNYKEYWRVKITVTNFNYRMNYSQWNLVTQHPSFDNLTTIFSFNYKSLNPYGVINDTAMLWGIKYYNDLLMTAGPDGNVQSELLFKKDPKSFTFEKGWAFPRRVYFNGDNCVMPPPDAYPWLPNASTRVMSSILLPFITIWTALTFLMVYA

SEQ ID NO: 175 - DNA, 1948 bp, Panicum virgatum
  misc_feature 1..1948: note = Ceres Clone ID no. 1788775
  misc_feature 1..1948: note = Encodes the peptide sequence at SEQ ID NO. 176
  source 1..1948: mol_type = unassigned DNA
aagggagcagccgctgcggagcagagtgtcgcgctgccgccgcggtaaaaacaggggaggagggagagacgcggccgcacccgcacatgctttaagtcccactccccaccgccccagatctccgccctcctccctctgccccccacattccccggcgcgccacctctgcccgcggccgccgccgctgtccggagcgagatcggcgtgggtgcacgggcgcagctcctgtatctgtcggtgggagaccccgcgcgtgtcggtgggagcgggtggggaggaagcgaaggatggcggcgggcggcagatccgtcgcgtgctgcaccgccgtgctgctcgcggccgcgctgctcctctccgcgccgactgccacagaggcttatgattccttggatccgaacggcaacatcactataaaatgggatattatgcagtggactcctgatggatatgtcgctgttgtcacaatgttcaactatcaacaattccggcacattggggcacctgggtggcagcttgggtggacatgggcaaagaaagaggtcatatggtcaatggttggggcacagactaccgaacagggtgactgctcgaaattcaagggcaacactccccactgctgcaagaaagatcccacgatcgtcgatttacttccgggcactccatacaacatgcaaattgccaattgctgcaaagcaggagttataaatacatttaatcaggacccagcaaatgctgcttcctccttccagattagtgtaggtcttgctgggactaccaataagactgttaaggtgccgaagaacttcactcttaagactccaggtcctgggtacacctgtgggcgtgccattgttggcaggccgacaaagtttttcacctcggatggacgcagggcaacccaagctctaatgacgtggaatgtgacttgcacatattcccaatttctagcccagaagactccgtcctgctgtgtatctctctcatcattttacaatgacacaattgtgaactgcccaacatgctcttgtggctgccaaaatccaagtggctccaactgtgtgaatgaggattcaccgaatctacaatctgcaattgatggccctgggaaatggactggtcagcctcttgtacaatgcacctcccacatgtgcccgataagaatccactggcatgtgaagctcaattacaaggaatactggagagtgaaaatcactatcacaaacttcaacttccgcatgaattacacgcagtggaacttagtcgttcagcatccaaactttgataatatcactcagctgttcagtttcaactacaaaccacttaccccatatggtggtggcataaatgatacggcaatgttctggggtgtaaaattctacaacgatttgctgatgcaagctggtaaacttgggaatgtgcaatcagaactacttcttcgcaaggactcccaggctttcaccttcgaaaagggatgggccttcccacgccgagtgtacttcaatggtgataactgtgtcatgccatctcctgaaaattatccatggctgcccaatgcaagccctctaacaaaacaaccattgacactcccactcttagtattctgggttgtgttggctactctgttggcttatgcgtgatgagtgggatcaagagatttagcgagcttcaagttgatgtcagattccatgaggtgcactgcagcaggccatttgttcattcacttccatggttgcacagaagagatgacaccacgccgagaaaagaaagtttatatgtgtgtgtgtttttggaagttaaggcccaaaatgtatttcttgtctggtatatactggccccacagcactttggtgaacttagttactgcaaattaggtaattacagttgcaccttttgtattttatagcaaactcagaatttttcattgaattatgactgctcttcttgtagc

SEQ ID NO: 176 - protein, 449 aa, Panicum virgatum
  REGION 54..218: note = Pfam Name: Phytochel_synth Pfam Description: Phytochelatin synthetase-like
  REGION 1..449: note = Ceres Clone ID no. 1788775
  REGION 1..449: note = Bit score of 935.6 for HMM based on sequences of Figure 3
  REGION 1..449: note = Functional Homolog Of SEQ ID NO. 117
MAAGGRSVACCTAVLLAAALLLSAPTATEAYDSLDPNGNITIKWDIMQWTPDGYVAVVTMFNYQQFRHIGAPGWQLGWTWAKKEVIWSMVGAQTTEQGDCSKFKGNTPHCCKKDPTIVDLLPGTPYNMQIANCCKAGVINTFNQDPANAASSFQISVGLAGTTNKTVKVPKNFTLKTPGPGYTCGRAIVGRPTKFFTSDGRRATQALMTWNVTCTYSQFLAQKTPSCCVSLSSFYNDTIVNCPTCSCGCQNPSGSNCVNEDSPNLQSAIDGPGKWTGQPLVQCTSHMCPIRIHWHVKLNYKEYWRVKITITNFNFRMNYTQWNLVVQHPNFDNITQLFSFNYKPLTPYGGGINDTAMFWGVKFYNDLLMQAGKLGNVQSELLLRKDSQAFTFEKGWAFPRRVYFNGDNCVMPSPENYPWLPNASPLTKQPLTLPLLVFWVVLATLLAYA

SEQ ID NO: 177 - DNA, 1849 bp, Zea mays
  misc_feature 1..1849: note = Ceres Clone ID no. 1546455
  misc_feature 1..1849: note = Encodes the peptide sequence at SEQ ID NO. 178
  source 1..1849: mol_type = unassigned DNA
gccctcctcaccactgcccccccattccccggcgcccagcacccggcgccgcaaccgccgcagtccggagcaagatcggtgggtagacggacgggcgacaggcgggcgggcgcggctctgtctgtatctatctgttggtgggagaccggttgtgtcggttaggcggcggcgggtgggaaggaagaatggcggcgggcggcagatccatcgcgtgcgttgccgccgtgctgctcgcggccgcgctgctcctctccgcaccgaccaccacagaggcctacgattcgctggatccaaacggcaacatcactataaaatgggatatcatgcagtggactcctgacggatatgtcgctgttgtcacaatgttcaattatcaacaatttcggcacatcggggcacctggatggcagcttgggtggacatgggcaaaaaaggaggttatatggtcaatggttggggctcagaccactgaacagggtgactgctcaaagttcaagggcaacaccccccattgctgcaagaaagatccaacaattgttgatttacttccaggcactccatacaacatgcaaattgccaattgctgcaaggcaggagttataaatacctttaaccaggacccagcaaatgctgcttcctccttccagatcagtgttggtcttgctggaactaccaataaaactgttaaggtgccgaagaatttcactcttaagactccaggccctgggtacacatgtgggcgtgctattgttggcaggccaacgaagtttttctctgcagatgggcgcagggtaacccaagctctaatgacatggaatgtgacctgcacatattcccaatttcttgctcagaagactccatcctgctgtgtatctctctcatcattttataatgacacaattgtgaactgcccgacatgctcatgtggctgccagaacccaagtgggtcaaactgtgtgaacgaggattcacctaatctacaagccgcaattgatggtcctggtaaatggactggccagcctcttgtacaatgcacttctcacatgtgcccaataagaatccactggcatgtgaagctcaactacaaggaatactggagagtgaaaatcactatcacgaacttcaacttccgcatgaattacacacagtggaacttagttgctcagcatccaaactttgataatatcactcagttgttcagcttcaactacaaaccacttactccatatgggggtggcataaatgatacggcaatgttctggggtgtaaagttctacaatgatttgctgatgcaagccggcaaacttgggaatgtgcaatcagaactgcttctccgcaaggactcacggactttcacattcgaaaagggatgggccttcccacgccgagtgtacttcaatggtgataattgtgtcatgccatctcctgaaaattatccatggctgccgaatgcaagccctctaacaaaacaagcattgacactcccactcttgatattctgggttgccttggctgttctgttggcttatgcatgatgagtgggatcaagatgtttagcaagcttcaagttgatgtcggattccatgaggtgcactgcaacgggatatttattcattcaattccatagcggcacaggagagatgaggcgaagccaagaaaaagtggatgtgtgtgtgtgtgtgtttgtaagttaaagggccaaaatgtatttcttgtctggtagtatatagcagctctacaacactttggtgaacttagttactgcaaattaggcaattacagttgcaccttttgtattttatagcaaacccagacttctattggattctatgactgcccctcttgtagc

SEQ ID NO: 178 - protein, 449 aa, Zea mays
  REGION 54..218: note = Pfam Name: Phytochel_synth Pfam Description: Phytochelatin synthetase-like
  REGION 1..449: note = Ceres Clone ID no. 1546455
  REGION 1..449: note = Bit score of 936.8 for HMM based on sequences of Figure 3
  REGION 1..449: note = Functional Homolog Of SEQ ID NO. 117
MAAGGRSIACVAAVLLAAALLLSAPTTTEAYDSLDPNGNITIKWDIMQWTPDGYVAVVTMFNYQQFRHIGAPGWQLGWTWAKKEVIWSMVGAQTTEQGDCSKFKGNTPHCCKKDPTIVDLLPGTPYNMQIANCCKAGVINTFNQDPANAASSFQISVGLAGTTNKTVKVPKNFTLKTPGPGYTCGRAIVGRPTKFFSADGRRVTQALMTWNVTCTYSQFLAQKTPSCCVSLSSFYNDTIVNCPTCSCGCQNPSGSNCVNEDSPNLQAAIDGPGKWTGQPLVQCTSHMCPIRIHWHVKLNYKEYWRVKITITNFNFRMNYTQWNLVAQHPNFDNITQLFSFNYKPLTPYGGGINDTAMFWGVKFYNDLLMQAGKLGNVQSELLLRKDSRTFTFEKGWAFPRRVYFNGDNCVMPSPENYPWLPNASPLTKQALTLPLLIFWVALAVLLAYA

SEQ ID NO: 179 - DNA, 1771 bp, Panicum virgatum
  misc_feature 1..1771: note = Ceres Clone ID no. 1902642
  misc_feature 1..1771: note = Encodes the peptide sequence at SEQ ID NO. 180
  source 1..1771: mol_type = unassigned DNA
agggagcagccgctgcggagcagagtgtgtcgcgctgccgccgcggtaaaaaacaggggagggcgaggcgcggccgcacatgctttaagtcccactccccaccgccccagatctccgcccccctcccactccggcactcccccccacattccccggcgcgccacctctgcccgcggccgccgccgccgccgtccggagcgagatcggcgtgggtgcacgggcgcggctcctgtatctgtcggtgggagaccccgcgtgtcggtgggagcgggtggggaccaagcgaaggatggcgccgggcggcagatccgtcgcgtgctgcgccgccgtgctgctcgcggccgcgctgctcctctccgcgccgactgctacagaggcttatgattccttggatccgaacggcaacatcactataaaatgggatattatgcagtggactcctgatggatatgtcgctgttgtcacaatgttcaactatcaacaattccggcacattggggcacctgggtggcagcttgggtggacatgggcaaagaaagaggtcatatggtcaatggttggggcacagactactgagcagggtgactgctcgaaattcaaaggcaacactccccactgctgcaagaaagatcccacgctcgtcgatttacttccgggcactccgtacaacatgcaaattgccaattgctgcaaagcaggagttataaatacatttaatcaggacccagcaaatgctgcttcctccttccagattagtgtaggtcttgctgggaccaccaataagactgttaaggtgccgaagaacttcactcttaagactccaggtcctgggtacacatgtgggcgtgccattgttggcaggccgacaaagtttttcacatcagatggacgcagggcaacccaagctctaatgacatggaatgtgacttgcacatattcccaatttctagcccagaagactccgtcctgctgtgtatctctctcatcattttacaatgacacaattgtgaactgcccaacatgctcttgtggctgccaaaatccaactggctcaaactgtgtgaatgaggattcaccgaatctacaatcagcaattgatggccctgggaaatggactggtcagcctcttgtacaatgcacctcccacatgtgcccgataagaatccactggcatgtgaagctcaattacaaggaatactggagagtgaaaataactatcaccaacttcaacttccgcatgaattacacgcaatggaacttagttgttcagcatccaaactttgataatatcactcagctgttcagtttcaactacaaaccacttaccccatatggtggtggcataaatgatacggcaatgttctggggtgtaaaattctacaatgatttgctgatgcaagctggtaaacttgggaatgtgcaatcagaactacttcttcgaaaggattctcaggctttcaccttcgaaaagggatgggccttcccacgtcgagtgtacttcaatggtgataactgtgtcatgccgtcccctgaaaattatccatggctgcccaatgcaagccctctaacaaaacaaccattgacactcccactctttgtattctgggttgtgttggctactctgttggcttatgcatgatgagtgggatcaagagatttagcgagcttcaagttgatgtcagattccatgaggtgcactgcaacaggccatttgttcattcaattccatggttgcacttcttaatgaaaaacgtgctcaggcacggtcgcg

SEQ ID NO: 180 - protein, 449 aa, Panicum virgatum
  REGION 54..218: note = Pfam Name: Phytochel_synth Pfam Description: Phytochelatin synthetase-like
  REGION 1..449: note = Ceres Clone ID no. 1902642
  REGION 1..449: note = Bit score of 935.1 for HMM based on sequences of Figure 3
  REGION 1..449: note = Functional Homolog Of SEQ ID NO. 117
MAPGGRSVACCAAVLLAAALLLSAPTATEAYDSLDPNGNITIKWDIMQWTPDGYVAVVTMFNYQQFRHIGAPGWQLGWTWAKKEVIWSMVGAQTTEQGDCSKFKGNTPHCCKKDPTLVDLLPGTPYNMQIANCCKAGVINTFNQDPANAASSFQISVGLAGTTNKTVKVPKNFTLKTPGPGYTCGRAIVGRPTKFFTSDGRRATQALMTWNVTCTYSQFLAQKTPSCCVSLSSFYNDTIVNCPTCSCGCQNPTGSNCVNEDSPNLQSAIDGPGKWTGQPLVQCTSHMCPIRIHWHVKLNYKEYWRVKITITNFNFRMNYTQWNLVVQHPNFDNITQLFSFNYKPLTPYGGGINDTAMFWGVKFYNDLLMQAGKLGNVQSELLLRKDSQAFTFEKGWAFPRRVYFNGDNCVMPSPENYPWLPNASPLTKQPLTLPLFVFWVVLATLLAYA

SEQ ID NO: 181 - DNA, 1350 bp, Sorghum bicolor
  misc_feature 1..1350: note = Ceres Annot ID no. 8632643
  misc_feature 1..1350: note = Encodes the peptide sequence at SEQ ID NO. 182
  source 1..1350: mol_type = unassigned DNA
atggcggcgggcggcagatccgtcgcgtgctgtgccgccgtgctgctcgcggccgcgctgctcctctccgcaccgactaccacagaggcttatgattcgctggatccaaccggcaacatcactataaaatgggatattatgcagtggactcctgacggatatgtcgctgttgtcacaatgtataattttcaacaatttcggcacatcggcgcacctggttggcagcttgggtggacatgggcaaagaaggaggttatatggtcaatggttggggctcagaccactgaacagggtgactgctcaaagttcaagggcaacaccccccattgctgcaagaaagatccaacaattgtcgatttactaccaggcactccatacaacatgcaaattgccaattgctgcaaggcaggagtcataaatacctttaaccaggacccagcaaatgctgcttcctccttccagatcagtgttggtcttgccggaactaccaataaaactgttaaggtgccaaagaacttcactcttaagactccaggccctgggtacacatgtgggcgtgccattgttggcaggccgacaaagttttggagcgcagatgggcgcagggcaacccaagctctaatgacatggaatgtgacctgcacatattcccaatttcttgctcagaagactccatcctgctgtgtctctctctcatcgttttataatgacacaattgtgaactgcccaacatgctcatgtggctgccagaacccaagtgggtcaaactgtgtgaatgaggattcacctaatctacaagctgcaattgatggtcctggcaaatggactggccagcctcttgtacaatgcacttcccacatgtgcccgataagaatccactggcatgtgaagctcaactacaaggaatactggagagtgaaaatcactatcacaaacttcaacttccgcatgaattacacgcagtggaacttagtagctcagcatccaaactttgataacatcactcagttgttcagcttcaactacaaaccacttactccatatgggggtggcataaatgatacggcaatgttctggggtgtaaaattctacaatgatttgctgatgcaagccggcaaacttggaaatgtgcaatcggaactgcttctccgcaaggactcccggactttcaccttcgataaggggtgggccttcccacgccgggtgtacttcaatggtgataattgtgtcatgccatctcctgaaaattatccatggctgccgaatgcaagccctctaacaagacaaccattgacactcccactcttggtattctgggttgccttggctgctctgttggcttatgcatga

SEQ ID NO: 182 - protein, 449 aa, Sorghum bicolor
  REGION 54..218: note = Pfam Name: Phytochel_synth Pfam Description: Phytochelatin synthetase-like
  REGION 1..449: note = Ceres Annot ID no. 8632643
  REGION 1..449: note = Bit score of 933.1 for HMM based on sequences of Figure 3
  REGION 1..449: note = Functional Homolog Of SEQ ID NO. 117
MAAGGRSVACCAAVLLAAALLLSAPTTTEAYDSLDPTGNITIKWDIMQWTPDGYVAVVTMYNFQQFRHIGAPGWQLGWTWAKKEVIWSMVGAQTTEQGDCSKFKGNTPHCCKKDPTIVDLLPGTPYNMQIANCCKAGVINTFNQDPANAASSFQISVGLAGTTNKTVKVPKNFTLKTPGPGYTCGRAIVGRPTKFWSADGRRATQALMTWNVTCTYSQFLAQKTPSCCVSLSSFYNDTIVNCPTCSCGCQNPSGSNCVNEDSPNLQAAIDGPGKWTGQPLVQCTSHMCPIRIHWHVKLNYKEYWRVKITITNFNFRMNYTQWNLVAQHPNFDNITQLFSFNYKPLTPYGGGINDTAMFWGVKFYNDLLMQAGKLGNVQSELLLRKDSRTFTFDKGWAFPRRVYFNGDNCVMPSPENYPWLPNASPLTRQPLTLPLLVFWVALAALLAYA

SEQ ID NO: 183 - DNA, 1845 bp, Zea mays
  misc_feature 1..1845: note = Ceres Clone ID no. 236876
  misc_feature 1..1845: note = Encodes the peptide sequence at SEQ ID NO. 184
  source 1..1845: mol_type = unassigned DNA
gagtgtctcgtgctgctgcttccgctgcagtaaaatacggggaagaggaggggagggagacgcggccgctgcctgccgcacatgctttaagtcccactccccacctccccagatctccgccctcctccccaccgcccccattcctcccctcggccgcaaccgtagccgccgcactacggagcaagatcgtcgggtagacggacgggcgggcgggcgggcgcggctctgtatctatctgtcggtgggagaccgcgtgtgtcggttaggcggcgggtggcaaggaagaatggcggcgagcggcagatccgtcgcgtgctgtgccgccgcgctgctcgcggccgcgttgctcctctccgcaccgactgcaacagaggcttatgattcgctggatccaaatggcaacatcaccataaaatgggatatcatgcagtggactcctgatggatatgtcgctgttgtcacaatgtttaattatcaacaatttcggcatatcggcgcacctggttggcagcttgggtggacatgggcaaagaaggaggttatatggtcaatggttggggctcagaccactgaacagggcgactgctcaaagttcaagagcagcccaccccattgctgcaagaaagatccaacaattgtcgatttacttccaggcactccatacaacatgcaaattgccaattgctgcaaggcaggagttgtaaatacctttaaccaggacccagcaaatgctgcttcctccttccagatcagtgttggtcttgctggaactaccaataaaactgttaaggtgcccaggaacttcactcttaagactccaggccctgggtacacatgtgggcgtgccattgttggcaggcctacgaagtttttcaccgcggacgggcgcagggcaacccaagctctaatgacatggaatgtgacctgcacatattcccaatttcttgctcagaagactccatcctgctgtgtatctctatcatcgttttataatgacacaattgtgaactgcccaacatgctcatgtggctgccagaacccaagtgggtcaaactgtgtgaatgaggattcacctaatctacaagctgcaattgatggccctggcaaatgcactggtcagccccttgtacaatgcacttcccacatgtgcccgataagaatccactggcatgtgaagctcaactacaaggattactggagagtgaaaatcactatcacaaacttcaacttccgcatgaattacacgcagtggaacttagtagcccagcatccaaactttgataatatcactcagttgttcagcttcaactacaaaccacttactccatatggtggtggcataaatgatacggcaatgttctggggtgtaaaattctacaatgatctgctgatgcaagccggcaaacttgggaatgtgcaatcagagctgcttctccgcaaggactcccggactttcactttcgaaaagggatgggccttcccacgccgagtttacttcaatggtgataattgtgtcatgccatctcctgaaaattatccatggctgccgaatgcaagccctctaacaaaaccattggcactcccattcttggtattctgggttgccttggctgctctgttggcttatgcatgattagtgggatcaagaggtttagcaagtttcaagttgatgtcagattccatgaggtgcactgcaacaagtcatttgttcattcaattccatggttgcacagaaaagatgaggcgatgccaagaaaaagtcgatatgtctatgtgtttaagttaaagggccaaaatgtatttcttgtttggtatataacagccctacaacactttggtgaactg

SEQ ID NO: 184 - protein, 448 aa, Zea mays
  REGION 54..218: note = Pfam Name: Phytochel_synth Pfam Description: Phytochelatin synthetase-like
  REGION 1..448: note = Ceres Clone ID no. 236876
  REGION 1..448: note = Bit score of 928.6 for HMM based on sequences of Figure 3
  REGION 1..448: note = Functional Homolog Of SEQ ID NO. 117
MAASGRSVACCAAALLAAALLLSAPTATEAYDSLDPNGNITIKWDIMQWTPDGYVAVVTMFNYQQFRHIGAPGWQLGWTWAKKEVIWSMVGAQTTEQGDCSKFKSSPPHCCKKDPTIVDLLPGTPYNMQIANCCKAGVVNTFNQDPANAASSFQISVGLAGTTNKTVKVPRNFTLKTPGPGYTCGRAIVGRPTKFFTADGRRATQALMTWNVTCTYSQFLAQKTPSCCVSLSSFYNDTIVNCPTCSCGCQNPSGSNCVNEDSPNLQAAIDGPGKCTGQPLVQCTSHMCPIRIHWHVKLNYKDYWRVKITITNFNFRMNYTQWNLVAQHPNFDNITQLFSFNYKPLTPYGGGINDTAMFWGVKFYNDLLMQAGKLGNVQSELLLRKDSRTFTFEKGWAFPRRVYFNGDNCVMPSPENYPWLPNASPLTKPLALPFLVFWVALAALLAYA

SEQ ID NO: 185 - protein, 436 aa, Cleome spinosa
  REGION 40..204: note = Pfam Name: Phytochel_synth Pfam Description: Phytochelatin synthetase-like
  REGION 1..436: note = Public GI ID no. 90657629
  REGION 1..436: note = Bit score of 893.8 for HMM based on sequences of Figure 3
  REGION 1..436: note = Functional Homolog Of SEQ ID NO. 117
MAWSLDSSGLTLLQEAYDALDPDGNITIKWDIMTWTADGYVAVVTIYNFQQYRHIQAPGWSLGWTWAKREVIWGMNGGQTTEQGDCSRFKGNIPHCCKQDPTVVDLMPGTPYNQQIANCCKGGVINSFAQDPATTVSAFQLTVGQAGTTNKTVRVPKNFTLKAPGPGYTCSPGNIVKPSRFISADKRRITQALMTWNVTCTYSQFLAQKTPTCCVSLSSFYTNTIVSCPTCACGCRKTSETGTCVDPKGPRIASVIQSPGKNSYMPPLVQCTNHMCPIRIHWHVKVNYKEYWRVKISITNFNYVMNYSQWNVVVQHPNFDNLTQIFSFNYKPLTPYASINDTGILWGVKYYNDLLMQAGPSGNVQSELLFRKDPLSFTLEKGWAFPRRIYFNGDNCVMPPPDSYPRLPNFGSSLIGSRPVAVLTFLSVTAFLHRNL

SEQ ID NO: 186 - protein, 457 aa, Triticum monococcum
  REGION 59..223: note = Pfam Name: Phytochel_synth Pfam Description: Phytochelatin synthetase-like
  REGION 1..457: note = Public GI ID no. 30090032
  REGION 1..457: note = Bit score of 917.6 for HMM based on sequences of Figure 3
  REGION 1..457: note = Functional Homolog Of SEQ ID NO. 117
MAPVGGVAGSSRSAACCAVLLAAVLFFSAPATTEAYDSLDPNGNITIKWDIISWTPDGYVATVTMFNYQQFRHIPAPGWQLGWSWAKKEVIWSMVGAQATEQGDCSKFKSAPPHCCKRDPTIVDLLPGTPFNQQIANCCKAGVIKTFNQDPGNAASSFQISVGLAGTTNKTVKMPKNFTLRAPGPGYTCGRALVGRPTKYYSSDGRRVTQALMSWNVTCTYSQFLAQKTPTCCVSLSSFYNDTIVNCPTCSCGCQNNITRPGSCVNDNSPYLQSAINGPGKLTGQPLVQCTSHMCPIRIHWHVKLNYKDYWRVKVTITNFNYRMNYTDWNMVAQHPNFDNITKLFSFNYKPLTPYGGRINDTAMFWGMKFYNDLLNQAGPLGNAQSELLMRKDSETFTFQKGWAFPRRVYFNGDNCVMPSPDDYPWLPSASPLTKQPWTLPLLVFWTALATLLAYYV

SEQ ID NO: 187 - DNA, 1380 bp, Sorghum bicolor
  misc_feature 1..1380: note = Ceres Annot ID no. 8640602
  misc_feature 1..1380: note = Encodes the peptide sequence at SEQ ID NO. 188
  source 1..1380: mol_type = unassigned DNA
atggcgaggctgcgactcctactgctccggcatctggctgccgccgctgctctgctcgccggcttctcttctctgccacctttggcagaagcatatgatcctcttgatccaaatgggaatatcacaataaaatgggatatcattcagtggacttcagatggttatgttgctgttgtttccatatacaattaccataaataccgacatatccaagcacccgggtggaaccttggatgggtgtgggcaaagaaggagatcatctggaccatagttggcgggcagaccacagagcaaggggattgctctcagttcaaaggcagtataccacactgctgcaagagggatccagcagttgttgacttgcttcctgggacaccttacaacatgcaggatgcaaattgttgcaaaggaggagtgcttaactcatgggttcaagacccagtcagtgcagtggcatcgtttcagatcagtgtcggccgatctggtactaccaactacacagtgaaagcgccactaaacttcactctgaaggccccaggaccaggatacagttgtggagtagctcatgtggtgaagcctcctacgaagttcatttcccaggacggaaggagaaccactcaagctcatgtgacatggaacgtgacatgtacatattcccaatttgttgctcagcgggctccaacttgttgtgtttcactctcatcattttacaatgaaaccatagttaactgcccaaaatgttcatgtggctgtcagaataccagaccgggaagttgtgttgagggtgattcaccttatttggcttctgtcgtgaatggaccgggcaagagcagcatgactcctctagttcagtgcacgccccatatgtgcccgataagagtgcattggcatgttaagctcaactacagggaatactggagggtgaagatcacggttacaaactggaattaccggatgaattactcacaatggaacttggtagttcagcacccaaatttcgacaaagttaccactattttcagcttcaactacaagcctctgaacccctatggagtaataaatgatactggaatgctgtggggtatcaagtactacaatgacctgctcatggtggctgggccagatggaaatgtgcaatctgagcttctgttccggaaggacccgtcgacattcactttcgagaaaggctgggcgttcccaaggcggatatacttcaatggcgacagctgtgtcatgcctccaccagatgcgtacccatggctaccaaactcttcccctgtactcctactgaagagctcatccctcgttctgcccatcgtgatttggacggcgatgctgttcttacggcttggtatgtactcaatccatcccaaattgtaa

SEQ ID NO: 188 - protein, 459 aa, Sorghum bicolor
  REGION 55..220: note = Pfam Name: Phytochel_synth Pfam Description: Phytochelatin synthetase-like
  REGION 1..459: note = Ceres Annot ID no. 8640602
  REGION 1..459: note = Bit score of 896.0 for HMM based on sequences of Figure 3
  REGION 1..459: note = Functional Homolog Of SEQ ID NO. 117
MARLRLLLLRHLAAAAALLAGFSSLPPLAEAYDPLDPNGNITIKWDIIQWTSDGYVAVVSIYNYHKYRHIQAPGWNLGWVWAKKEIIWTIVGGQTTEQGDCSQFKGSIPHCCKRDPAVVDLLPGTPYNMQDANCCKGGVLNSWVQDPVSAVASFQISVGRSGTTNYTVKAPLNFTLKAPGPGYSCGVAHVVKPPTKFISQDGRRTTQAHVTWNVTCTYSQFVAQRAPTCCVSLSSFYNETIVNCPKCSCGCQNTRPGSCVEGDSPYLASVVNGPGKSSMTPLVQCTPHMCPIRVHWHVKLNYREYWRVKITVTNWNYRMNYSQWNLVVQHPNFDKVTTIFSFNYKPLNPYGVINDTGMLWGIKYYNDLLMVAGPDGNVQSELLFRKDPSTFTFEKGWAFPRRIYFNGDSCVMPPPDAYPWLPNSSPVLLLKSSSLVLPIVIWTAMLFLRLGMYSIHPKL

SEQ ID NO: 189 - protein, 458 aa, Oryza sativa
  REGION 53..218: note = Pfam Name: Phytochel_synth Pfam Description: Phytochelatin synthetase-like
  REGION 1..458: note = Public GI ID no. 115453533
  REGION 1..458: note = Bit score of 894.2 for HMM based on sequences of Figure 3
  REGION 1..458: note = Functional Homolog Of SEQ ID NO. 117
  source 1..458: note = Oryza sativa subsp. japonica
MARFLLGAAAIALLAGVSSLLLMVPFAEAYDPLDPNGNITIKWDITQWTPDGYVAVVTIYNFQKYRHIQAPGWSLGWAWAKKEIIWSMAGGQATEQGDCSAFKANIPHCCKRDPRVVDLVPGAPYNMQFGNCCKGGVLTSWVQDPLNAVASFQITVGHSGTSNKTVKAPKNFTLKAPGPGYSCGLAQEVKPPTRFISLDGRRTTQAHVTWNVTCTYSQFVAQRAPTCCVSLSSFYNETIVNCPKCACGCQNKKPGSCVEGNSPYLASVVNGPGKGSLTPLVQCTPHMCPIRVHWHVKLNYRDYWRVKVTITNWNYRMNYSQWNLVVQHPNFENVSTVFSFNYKSLNPYGVINDTAMMWGVKYYNDLLMVAGPDGNVQSELLFRKDRSTFTFDKGWAFPRRIYFNGESCVMPSPDLYPWLPPSSTPRFRTVFLLMSFLVCGTLAFLHNHLVLDKNCGKC

SEQ ID NO: 190 - protein, 460 aa, Zea mays
  REGION 57..223: note = Pfam Name: Phytochel_synth Pfam Description: Phytochelatin synthetase-like
  REGION 1..460: note = Public GI ID no. 162462330
  REGION 1..460: note = Bit score of 900.6 for HMM based on sequences of Figure 3
  REGION 1..460: note = Functional Homolog Of SEQ ID NO. 117
MAPPPLLPARFVAASVALLAVAFSSSLTRPSGAYDPLDPNGNITIKWDVIQWTADGYVAVVSLYNYQQYRHIQAPPGWRLGWVWAKKEVIWAMTGGQATEQGDCSRFKASVLPHCCRRDPEVVDLLPGTPYNTQTANCCRGGVLASWAQDPSDAVASFQVSVGQAGSTNRTVKVPRNFTLLAPGPGYTCGAAKLVKPTKFMSQDGRRSTQAHMTWNVTCTYSQFLAQRSPTCCVSLSSFYNDTIVSCPACSCGCQNNNSSSTAAPGSCVEGSRRSPYLASVVNDPSKNSLAPLVQCTSHMCPVRVHWHVKVSYKEYWRVKITVTNFNYRMNYSQWNLVAQHPNFDNLTTIFSFNYRPLNPYGVINDTAMLWGIKYYNDLLMTAGPDGNVQSELLFRKEPSTFTFHKGWAFPRRVYFNGDNCVMPPPDAYPWLPNAASPRLSPSLLLPLVAAAWTAFAVLS

SEQ ID NO: 191 - protein, 456 aa, Triticum aestivum
  REGION 59..222: note = Pfam Name: Phytochel_synth Pfam Description: Phytochelatin synthetase-like
  REGION 1..456: note = Public GI ID no. 38230578
  REGION 1..456: note = Bit score of 900.3 for HMM based on sequences of Figure 3
  REGION 1..456: note = Functional Homolog Of SEQ ID NO. 117
MAPVGGVAGSSRSAACCAVLLAAVLFFSAPATTEAYDSLDPNGNITIKWDIISWTPDGYVATVTMFNYQQFRHIPAPGWQLGCSWAKKEVIWSMVGAQATEQGDCSKFKSAPPHCCKRDPTIVDLLPGTPFNQQIANCCKAGVIKTFNQDPGNAASSFQISVGLAGTTNKAVKMPKNFTLRAPGPGYTCGRALVGRPTKYYSDGRRVTQALMSWNVTCTYSQFLAQKTPTCCVSLSSFYNDTIVNCPTCSCGCQNNITRPGSCVNDNSPYLQSAINGPGKLTGQPLVQCTSHMCPIRIHWHVKLNYKDYWRVKVTITNFNYRMNYTDWNMVAQHPNFDNITKLFSFNYKPLTPYGGRINDTAMFWGMKFYNDLLNQAGPLGNAQSELLMRKDSETFTFQKGWAFPRRVYFNGDNCVMPSPDDYPWLPSASPLTKQPWTLPLLVFWTVLSTLLAYYV

SEQ ID NO: 192 - DNA, 1278 bp, Sorghum bicolor
  misc_feature 1..1278: note = Ceres Annot ID no. 8632641
  misc_feature 1..1278: note = Encodes the peptide sequence at SEQ ID NO. 193
  source 1..1278: mol_type = unassigned DNA
atggcgacgggcggcagactggccgtcacttgctccgccgccgtgctgctcgccgtggcgctgctgatctccgcaccggacgccgcagaggcttatgattctctagatccaaacggcaacatcactataaaatgggatgttatgcaatggactcctgatggatatgtcgctgttgtcacaatgtacaattaccaacaatttcggcacattgggccacccggatggcagcttgggtggacatgggcaaagaaggaggttatatggtcaatggttggggctcaggccaccgaacagggtgactgctcaaagttcaagggcaacattcctcacagctgcaagaaagatcccgtgatcgttgatttacttccaagcacaccatatgacatgcaaattgccaattgctgcaaggcaggagttataagtacaattagtcaggatccagcaaatgctgcttcctcatttcagctcagtgtaggtctttctgggtctaccactaagactgtcaaggtgccgaagaacttcacccttaggactcctggccccggttacacctgtgggcgtgctattgttggcaagcctactatatttttctctgcagatggccgcagggcaaccaaagctctaatgacatggaatgtgacctgcacgtattcccaatttcttgctcagaagactccgtcctgctgtgtatctctttcatcgttttataacaacactactgtgaactgcccaacatgctcctgtggctgccagaacccaagtggatcaaactgtgtgaataagggttcgcctcgcctacgatctgctattgatggccctggcaaatggagtggcgagcctcttgtggagtgcacttcccacatgtgccccgtaaaaatcaactggcacgtgaagcagaacagcaaggactactggagagtgaagatcaccatcacaaacctcaacttccgaatgaactacagcgagtggaacctggttgttcagcatccaaacttcgataacatcactcagttgttcggcctcaactacaaaccactcactccatatgggggtgacataaatgacacggcaatgttctggggtgtgaagtcctacaatgatgtgctgatgcaagacggtaagcttgggatggtgcagtcagagctccttctccgtaaagactcccggactttcacattcgaaaagggatgggccttcccacgccgggtgtacttcaatggtgataactgtgtcatgccagctcctgaaaattacccatcgttgccaatgcaagcctag

SEQ ID NO: 193 - protein, 425 aa, Sorghum bicolor
  REGION 55..219: note = Pfam Name: Phytochel_synth Pfam Description: Phytochelatin synthetase-like
  REGION 1..425: note = Ceres Annot ID no. 8632641
  REGION 1..425: note = Bit score of 808.3 for HMM based on sequences of Figure 3
  REGION 1..425: note = Functional Homolog Of SEQ ID NO. 117
MATGGRLAVTCSAAVLLAVALLISAPDAAEAYDSLDPNGNITIKWDVMQWTPDGYVAVVTMYNYQQFRHIGPPGWQLGWTWAKKEVIWSMVGAQATEQGDCSKFKGNIPHSCKKDPVIVDLLPSTPYDMQIANCCKAGVISTISQDPANAASSFQLSVGLSGSTTKTVKVPKNFTLRTPGPGYTCGRAIVGKPTIFFSADGRRATKALMTWNVTCTYSQFLAQKTPSCCVSLSSFYNNTTVNCPTCSCGCQNPSGSNCVNKGSPRLRSAIDGPGKWSGEPLVECTSHMCPVKINWHVKQNSKDYWRVKITITNLNFRMNYSEWNLVVQHPNFDNITQLFGLNYKPLTPYGGDINDTAMFWGVKSYNDVLMQDGKLGMVQSELLLRKDSRTFTFEKGWAFPRRVYFNGDNCVMPAPENYPSLPMQA

SEQ ID NO: 194 - protein, 465 aa, Physcomitrella patens
  REGION 69..234: note = Pfam Name: Phytochel_synth Pfam Description: Phytochelatin synthetase-like
  REGION 1..465: note = Public GI ID no. 168016456
  REGION 1..465: note = Bit score of 760.2 for HMM based on sequences of Figure 3
  REGION 1..465: note = Functional Homolog Of SEQ ID NO. 117
  source 1..465: note = Physcomitrella patens subsp. patens
MPVSILFAFYGSIWLLPSNLSRIVSVFSEFVCCNNIYLSTVADAGYDPIDPEGNITIKWDVVEWTGDGYRAIVTMSNWQLYRHIQAPGWIMGWTWATKKEVIWNMVGAETREQGDCSKFTGNLPHCCKRTPEVIDLLPGVPYNQQTANCCRGGVLSSYMQDPKTSVASFQVIVGNTGNKNTTIKLPQNFTIMTPGPGYTCSSAKVVPKTKFLSPSGRRITEAFMTWTVKCSYTEQLAHKAATCCVSFSAFYNETIVPCEKCACDCPTNNTTPIITTNGADTNNQRCINRTKNNNLQQQPDMLYCTNDMCPVKIHWHIKLNYQEYWRVKITITNRDISRNYTLWNLVARHPNFKNFTESFSFSYKPLTAYGPTNDTAIFWGVKYYNDMLMQAGPSGNVQSEILFRKDSAFTLANGWGFPSHVLFNGDHCVLPHADHYPTLPSSSSTLRAATTTIALLVLFAVALLI

SEQ ID NO: 195 - protein, 425 aa, Oryza sativa
  REGION 51..217: note = Pfam Name: Phytochel_synth Pfam Description: Phytochelatin synthetase-like
  REGION 1..425: note = Public GI ID no. 125532513
  REGION 1..425: note = Bit score of 660.7 for HMM based on sequences of Figure 3
  REGION 1..425: note = Functional Homolog Of SEQ ID NO. 117
  source 1..425: note = Oryza sativa subsp. indica
MAIGVGGCCAVLLAAALLFSSPATTYAYDSLDPNGNITIKWDVMQWTPDGYAAVVTLSNYQQFRHIQPPGWQLGWTWQQKEVIWSMYGAQAIEQGDCSMSKEGSNVPHSCKKHPTVVDLLPGTPIDLQIANCCKAGSLSAFSQDPANSAASFQIIVGHSGNSNETVRVPKNFSLMAPGPGYTCSRAMIVKPSRFLSPDGRRATQALMTWNVICTYSQFLAQKVPSCCVSLSSFDNDKTVDCPTCSCGCRNEKSTTGKCVKKNAPDLQSIIHGPGRWTWQPLLQCTSHMCPVKINWHLMLKDKEHYRVKITVTNLNYRMNFTEWNLVVQYHPILDITQISGFNYKSIQVGKINDTTMLWGVKPYYDLLMQAGPLGNVQGELIVRKDFRASSTSNNNKGRAFPVRVYFNGDNCVMPPPDAYPVSITA

SEQ ID NO: 196 - protein, 437 aa, Vitis vinifera
  REGION 50..213: note = Pfam Name: Phytochel_synth Pfam Description: Phytochelatin synthetase-like
  REGION 1..437: note = Public GI ID no. 157354382
  REGION 1..437: note = Bit score of 638.0 for HMM based on sequences of Figure 3
  REGION 1..437: note = Functional Homolog Of SEQ ID NO. 117
MFFSLFTFMSPSCKIQLNFLIGNADGYDPLDPNGNIAIKWDVLQWSSSSYDARVSIINYQLYRHIETPGWKLSWTWPGDEVIWDMWGALAHEQGNCSEFKGEQLPYCCEKTPLILDRGPGTPFNKQVANCCRDGLLTSMIQDPSKHGAMFQMNVGTASSNVSDMTMPRNFSLGVPGYTCGDPFQVPPSRFPEEGGRRWTQALMTWNVSCSYSQFLASTAPTCCVSLSAFYNSTIVPCPQCSCGCEGIPGTKCAKPGETPLLLPQGDGQQPDLVRCSRHMCPIRVHWHVKTSYREYWRVKITVTNLNLVKNYSAWNLVVLHPNLQSITQVFSFNYRSLNEHGTINDTGMFWGIQYYNELLLQAGESGNVQTEMLLHKDPGIFTFREGWAFPRKISFNGDQCVMPSPDEYPRLPNTGPSATPPSLCIILLLSLSVIVML

SEQ ID NO: 197 - DNA, 1296 bp, Populus balsamifera
  misc_feature 1..1296: note = Ceres Annot ID no. 1481980
  misc_feature 1..1296: note = Encodes the peptide sequence at SEQ ID NO. 198
  source 1..1296: mol_type = unassigned DNA; note = Populus balsamifera subsp. trichocarpa
atgggcatggtcttgattttgatcttcttcttcttctatctcattagctctatatcaccttcttatgggtttgacccacttgatccttatggcaacataaccatcaaatgggatcttcttctatcgaattccggtacaaataatctgatggtatcaatttacaacttccaacaatatcgccatgtggaaccaccaggctggaaattgaattgggcatggaaaggcaaagaggtgatatggtcaatgcagggagctgaggctactgagcaaggaaactgcactgaattcaaggaatcaacccttcctcattgttgtgagaaggagccattcattgtagaccttcttcccggaaccaattataatgctcaaacccaaaattgttgcaagggaggtgtactgtcatccatgaagcaagatccttccaagtatgttgctacttttcagatggctgtcggaggttctggtaccaattcccaatttaaaatgccggaaaatttcaaacttggagttccaggctatagttgtgggggtgcagttaaggtagaacccagcaggtacacaacagatggaggccggcgatggacacaggctcttgcgacatggaatgtgacctgcatgtactcccagagtttagcatcacctacaccaagatgttgtgtttccttgtctgcattctacaatcaaactattgtttcgtgccccagatgcagctgcggctgccaaggacaacctggaacaaaatgtgtaaagtatggtgagaccccaccattgctgaaacaaaatcaagatccaacacctgtagtaaggtgctcagagcatatgtgcccaataagggtgcattggcatctgaaagaaagttacaaacaatattggagggctaaaatgacagttacaaatttccacatcatgaaaaattattcagaatggaacttggtggtgctacatcccaacctgcaaagtctgacacaggttttcagcttcaactacgcacccctcaatcgatacggatatatcaatgatactgggatgttttgggggcttcctttttacaatgacattttactacaagaaggaaaggatgggaatttacagactgaaattttactacgcaaagatccagggatttttactttcagagaaggttggggtttccctagaaagattcaatttaatggtgatgaatgtgtcatgcctccaccggatgaatatccatcgctgcccaacaaggggcatagtgcctctgctaccacacctttcataattcttttctctttgtttctcgcatttatgctctaa

SEQ ID NO: 198 - protein, 429 aa, Populus balsamifera
  REGION 48..207: note = Pfam Name: Phytochel_synth Pfam Description: Phytochelatin synthetase-like
  REGION 1..429: note = Ceres Annot ID no. 1481980
  REGION 1..429: note = Bit score of 637.4 for HMM based on sequences of Figure 3
  REGION 1..429: note = Functional Homolog Of SEQ ID NO. 117
  source 1..429: note = Populus balsamifera subsp. trichocarpa
MVLILIFFFFYLISSISPSYGFDPLDPYGNITIKWDLLLSNSGTNNLMVSIYNFQQYRHVEPPGWKLNWAWKGKEVIWSMQGAEATEQGNCTEFKESTLPHCCEKEPFIVDLLPGTNYNAQTQNCCKGGVLSSMKQDPSKYVATFQMAVGGSGTNSQFKMPENFKLGVPGYSCGGAVKVEPSRYTTDGGRRWTQALATWNVTCMYSQSLASPTPRCCVSLSAFYNQTIVSCPRCSCGCQGQPGTKCVKYGETPPLLKQNQDPTPVVRCSEHMCPIRVHWHLKESYKQYWRAKMTVTNFHIMKNYSEWNLVVLHPNLQSLTQVFSFNYAPLNRYGYINDTGMFWGLPFYNDILLQEGKDGNLQTEILLRKDPGIFTFREGWGFPRKIQFNGDECVMPPPDEYPSLPNKGHSASATTPFIILFSLFLAFML

SEQ ID NO: 199 - DNA, 1263 bp, Populus balsamifera
  misc_feature 1..1263: note = Ceres Annot ID no. 1535466
  misc_feature 1..1263: note = Encodes the peptide sequence at SEQ ID NO. 200
  source 1..1263: mol_type = unassigned DNA; note = Populus balsamifera subsp. trichocarpa
atgggcatggtcttgattttgatcttcttcttcttctatctcattagctctatatcaccttcttatgggtttgacccacttgatccttatggcaacataaccatcaaatgggatcttcttctatcgaattccggtacaaataatctgatggtatcaatttacaacttccaacaatatcgccatgtggaaccaccaggctggaaattgaattgggcatggaaaggcaaagaggtgatatggtcaatgcagggagctgaggctactgagcaaggaaactgcactgaattcaaggaatcaacccttcctcattgttgtgagaaggagccattcattgtagaccttcttcccggaaccaattataatgctcaaacccaaaattgttgcaagggaggtgtactgtcatccatgaagcaagatccttccaagtatgttgctacttttcagatggctgtcggaggttctggtaccaattcccaatttaaaatgccggaaaatttcaaacttggagttccaggctatagttgtgggggtgcagttaaggtagaacccagcaggtacacaacagatggaggccggcgatggacacaggctcttgcgacatggaatgtgacctgcatgtactcccagagtttagcatcacctacaccaagatgttgtgtttccttgtctgcattctacaatcaaactattgtttcgtgccccagatgcagctgcggctgccaaggacaacctggaacaaaatgtgtaaagtatggtgagaccccaccattgctgaaacaaaatcaagatccaacacctgtagtaaggtgctcagagcatatgtgcccaataagggtgcattggcatctgaaagaaagttacaaacaatattggagggctaaaatgacagttacaaatttccacatcatgaaaaattattcagaatggaacttggtggtgctacatcccaacctgcaaagtctgacacaggttttcagcttcaactacgcacccctcaatcgatacggatatatcaatgatactgggatgttttgggggcttcctttttacaatgacattttactacaagaaggaaaggatgggaatttacagactgaaattttactacgcaaagatccagggatttttactttcagagaaggttggggtttccctagaaagattcaatttaatggtgatgaatgtgtcatgcctccaccggatgaatatccatcgctgcccaacaaggggcatagtgcctctaaggtattaccgacaaaataa

SEQ ID NO: 200 - protein, 418 aa, Populus balsamifera
  REGION 48..207: note = Pfam Name: Phytochel_synth Pfam Description: Phytochelatin synthetase-like
  REGION 1..418: note = Ceres Annot ID no. 1535466
  REGION 1..418: note = Bit score of 618.3 for HMM based on sequences of Figure 3
  REGION 1..418: note = Functional Homolog Of SEQ ID NO. 117
  source 1..418: note = Populus balsamifera subsp. trichocarpa
MVLILIFFFFYLISSISPSYGFDPLDPYGNITIKWDLLLSNSGTNNLMVSIYNFQQYRHVEPPGWKLNWAWKGKEVIWSMQGAEATEQGNCTEFKESTLPHCCEKEPFIVDLLPGTNYNAQTQNCCKGGVLSSMKQDPSKYVATFQMAVGGSGTNSQFKMPENFKLGVPGYSCGGAVKVEPSRYTTDGGRRWTQALATWNVTCMYSQSLASPTPRCCVSLSAFYNQTIVSCPRCSCGCQGQPGTKCVKYGETPPLLKQNQDPTPVVRCSEHMCPIRVHWHLKESYKQYWRAKMTVTNFHIMKNYSEWNLVVLHPNLQSLTQVFSFNYAPLNRYGYINDTGMFWGLPFYNDILLQEGKDGNLQTEILLRKDPGIFTFREGWGFPRKIQFNGDECVMPPPDEYPSLPNKGHSASKVLPTK

SEQ ID NO: 201 - DNA, 1365 bp, Arabidopsis thaliana
  misc_feature 1..1365: note = Ceres Annot ID no. 1297618
  misc_feature 1..1365: note = Encodes the peptide sequence at SEQ ID NO. 202
  source 1..1365: mol_type = unassigned DNA
atgggtgcaatgctaaatcttttgctcgtcgttactgtcattctctgttcaatcttatcacccacacggtttatgattatgattgataaaatggttgcagatggatacgatcctcttgatccgttcggaaaaatcattatcaaatgggatcttcttttatcatcacctggccaacaccacgtacaagtaacgttagagaacatgcaagagtatcgacacgtggaaaagccagggtggaagcttagctggcattggctcaaccaagaagtgatatgggacatgaaaggagctgagacgacggagcaaggtaattgctctgcctttgcctccagcggtaaccttcctcactgctgtctcgagcgaccaaccatagtcgaccttcttcccggtgcttctctcaacgttcaagttgccaattgttgccgtggaggcgtcttgacttccatgtctcaggaccacgccaatcacgtctctgcttttcacatgacagttggaagctctcctgatggccctgaggagttcaatatgccttctaatttcgatataggggtcccgggttatagctgcgacaatgctacatccgtgtccccgactaagtttagtactgataagggccgtcgcaaaacacaagctctagcaacatgggaggcagtgtgtgtatactcgcagtttcggtcatcaccatcgccaaaatgctgcgtttcactctctgccttctactaccaaaacattgttccttgtcctacctgtagctgcggctgctcgagttcccattgtgtcaaggatggagagttgccgccatatcttgaacagaaacatgatccagatgaggaagtatcgcctgtcgtgaagtgttcggatcatatgtgtcccatccgcatccactggcatgtgaaagtgaactatagagagtattggagggttaagatcacagcaacaaatttcaacacaatgaagaattacactaattggaacttagtggtgcttcatccaaacttgaaaagcgtccaacaagtctttagctttaactacaaatctttgacaccatatcaaaacagcatcaatgacacagggatgttttggggagtccagttttataatgatgttttgcttcaagaaggaaagattgggaatgttcaaacagagttattgctgaagaaggatatgggaaatttcactttcagagaaggttgggctttcccaaggagaatcttgttcaatggtgatgaatgtgttatgccttctccagatgactttccaaggctgccaaaatctgctcattcctcttcgtcttcctctgctgttattagctctgtttcagtcgttttctgttttctccttcatcatcttcttctactagtttga

SEQ ID NO: 202 - protein, 454 aa, Arabidopsis thaliana
  REGION 59..223: note = Pfam Name: Phytochel_synth Pfam Description: Phytochelatin synthetase-like
  REGION 1..454: note = Ceres Annot ID no. 1297618
  REGION 1..454: note = Bit score of 629.4 for HMM based on sequences of Figure 3
  REGION 1..454: note = Functional Homolog Of SEQ ID NO. 117
MGAMLNLLLVVTVILCSILSPTRFMIMIDKMVADGYDPLDPFGKIIIKWDLLLSSPGQHHVQVTLENMQEYRHVEKPGWKLSWHWLNQEVIWDMKGAETTEQGNCSAFASSGNLPHCCLERPTIVDLLPGASLNVQVANCCRGGVLTSMSQDHANHVSAFHMTVGSSPDGPEEFNMPSNFDIGVPGYSCDNATSVSPTKFSTDKGRRKTQALATWEAVCVYSQFRSSPSPKCCVSLSAFYYQNIVPCPTCSCGCSSSHCVKDGELPPYLEQKHDPDEEVSPVVKCSDHMCPIRIHWHVKVNYREYWRVKITATNFNTMKNYTNWNLVVLHPNLKSVQQVFSFNYKSLTPYQNSINDTGMFWGVQFYNDVLLQEGKIGNVQTELLLKKDMGNFTFREGWAFPRRILFNGDECVMPSPDDFPRLPKSAHSSSSSSAVISSVSVVFCFLLHHLLLLV

SEQ ID NO: 203 - protein, 444 aa, Zea mays
  REGION 49..224: note = Pfam Name: Phytochel_synth Pfam Description: Phytochelatin synthetase-like
  REGION 1..444: note = Public GI ID no. 119040466
  REGION 1..444: note = Bit score of 590.5 for HMM based on sequences of Figure 3
  REGION 1..444: note = Functional Homolog Of SEQ ID NO. 117
MGRFVFVLLILMCCSSSRFTGAYDPIDPNGNITIVWDFQSLDVAGMTPYTVMVSIHNYQMYRHIERPGWRLSWSWAGKEVIWSTTGAETTEQGDCSRVGSGGSRPHCCQKRPVMVDLPPGTPYNMQVANCCRGGVLSSLVQSDLTSAAAFQMVVGEFALARDSGGKEPEKPWQFDMGVPGYTCSNATTVAPTRIKVDKNRYVQALQDRAELRAVTWQVTCSYSQYRASAAPSCCVSMTTFYSETIVDCPRCSCGCQGSPPSPQCVSVDQQQPWLPAVGDDEPSSAPIVWCSEHMCPIRVHWHVKTNYRKYWRVKVTVSNYNLARNYSDWNLVLQHPNLRSLTQLFSFNYRPLVEYGAYNDTGMFWGLRYYNEMLLQDGNVQSEMILEKESDFTYSGGWAFPRRVYFNGQECVMPPADQYPVLPNGASALRGHFCFLLLLFFVVV

SEQ ID NO: 204 - protein, 437 aa, Oryza sativa
  REGION 45..212: note = Pfam Name: Phytochel_synth Pfam Description: Phytochelatin synthetase-like
  REGION 1..437: note = Public GI ID no. 116310381
  REGION 1..437: note = Bit score of 603.0 for HMM based on sequences of Figure 3
  REGION 1..437: note = Functional Homolog Of SEQ ID NO. 117
  source 1..437: note = Oryza sativa subsp. indica
MDVDQLILFVFVCCLSSRFADAYDPVDPNGNIIINWDFQSIENVYTVMVSVHNHQLYRHIEQPGWRLSWRWAGNEIIWGMTGAEATEQGDCHRIRGATRPHCCEKQPVIVDLPPGTPYNNQVSSCCRGGVLSSLTQNNRTSTAAFQMVVGGFRRATYHDGDRGPALPSRFGVGVPGYSCSNATKVNATRSPIGRHRHVQSLLTWQVTCTYSQFMEAASPTCCVSLSSFYNSTIVPCPRCSCGCPRSPTAPQCISEGEKPELPAGDGEAVAPVFRCTDHMCPVRVHWHVKISYREYWRVKVTITNYNQVKNYSDWNLVVQHPNLRSLTQLFSFNYQPLIEYGTLNDTGMFWGIQYYNEMMLQDGNVQTEMILKKDKSDFTFSGGWAFPRRVYFDGHECVMPPPDQYPLLPNGGPDSRVSAAQLIASSCLLLPFIFLIM

SEQ ID NO: 205 - DNA, 1329 bp, Sorghum bicolor
  misc_feature 1..1329: note = Ceres Annot ID no. 8702104
  misc_feature 1..1329: note = Encodes the peptide sequence at SEQ ID NO. 206
  source 1..1329: mol_type = unassigned DNA
atggccgcgcaatccgcgattattgctgatcgttttcaccgcgtcgaatcagatgcctacgaccccgtagatccgaacgggaacatcacgatcaactgggattttcaggtcctcaacgtcaaggacatgtccccgtacacggtcatggtgagcatccacaactaccagatgtaccggcacatcgagcacccggggtggcggctgagctggaactggaccggcaaggaggtcatctggaacacggtgggcgcggagacgacggagcagggcgactgctcccgcgtcggcgccgccaacgcccgcccgcattgctgcctgaggcggcccgtcatggtggacctcccgcccggcaccccgtacaacaggcaggtcgccaactgctgccgcggcggcgtgctgtcgtccttcgtccagaacaatctgacgtccaccgccgcgttccagatggtcgtcggcgagttcgccctcgccaaggacgacggcggcggtagtatggagcccgagaagccgtggcatttcgacatcggcgtgccagggtacacctgcagcaacgccaccacggtagccccgaccagggtcaaggtcgacaagaaccgctacgaacaagtgctcctgacatggcaggtgacctgctcgtactctcagtaccgggcgtcgggggtgccgtcgtgctgcgtctccatgtcgacgttctacagcgagacgatcgtggattgcccgcgctgcagctgcgcctgccaagggtccccaacgccaacgtcgccacaatgcgtcagcgtcgaccaaccacggacaccagcgttgccggcgagcagcgacgacgagccggcggcgccgatcgtctggtgctcggagcacatgtgcccgatccgggtgcactggcacgtgaaggtgaactaccggcagtactggcgggtgaaagtgacggtgtccaactacaacctggtgaagaactacagcgactggaacctggtgctgcagcaccccaacctgcggagcctcacgcagctgttcagcttcaattacaagcctctcgtcgagtacggcagcttcaatgacacggggatgttctgggggttacgtttctacaacgagatgctgctgcaggacgggaacgtgcagacggagatgattctggagaaggagagcgacttcacctattccggcggctgggcgttcccgaggagggtctacttcaacggccaagagtgcgtcatgccgccggcggaccagtaccccaaactgcccaacggggcctcggaattgcgggggtcgtcgctgatcgccggcaattgcttgctgctgctattcttcttcgttctcgtgtag

SEQ ID NO: 206 - protein, 442 aa, Sorghum bicolor
  REGION 46..215: note = Pfam Name: Phytochel_synth Pfam Description: Phytochelatin synthetase-like
  REGION 1..442: note = Ceres Annot ID no. 8702104
  REGION 1..442: note = Bit score of 589.8 for HMM based on sequences of Figure 3
  REGION 1..442: note = Functional Homolog Of SEQ ID NO. 117
MAAQSAIIADRFHRVESDAYDPVDPNGNITINWDFQVLNVKDMSPYTVMVSIHNYQMYRHIEHPGWRLSWNWTGKEVIWNTVGAETTEQGDCSRVGAANARPHCCLRRPVMVDLPPGTPYNRQVANCCRGGVLSSFVQNNLTSTAAFQMVVGEFALAKDDGGGSMEPEKPWHFDIGVPGYTCSNATTVAPTRVKVDKNRYEQVLLTWQVTCSYSQYRASGVPSCCVSMSTFYSETIVDCPRCSCACQGSPTPTSPQCVSVDQPRTPALPASSDDEPAAPIVWCSEHMCPIRVHWHVKVNYRQYWRVKVTVSNYNLVKNYSDWNLVLQHPNLRSLTQLFSFNYKPLVEYGSFNDTGMFWGLRFYNEMLLQDGNVQTEMILEKESDFTYSGGWAFPRRVYFNGQECVMPPADQYPKLPNGASELRGSSLIAGNCLLLLFFFVLV

SEQ ID NO: 207 - protein, 433 aa, Vitis vinifera
  REGION 40..203: note = Pfam Name: Phytochel_synth Pfam Description: Phytochelatin synthetase-like
  REGION 1..433: note = Public GI ID no. 157340500
  REGION 1..433: note = Bit score of 535.8 for HMM based on sequences of Figure 3
  REGION 1..433: note = Functional Homolog Of SEQ ID NO. 117
MFFNKLFYSFSVFADCYDPLDPNGNITITFDTHKWTDDGYVARVTIQNYYQYRHVEKQGWKLGWTWAKDEVIWSMSGAFATQQGNCSSFIVQTPHSCLKNPVIVDLEPTAAPENMTEDCCHGGILSAWAIIPSNSFSSFEIMVGNLEGNTHGNKPLNLTLMAPGPGYTCSPIEDTDPTVSLVIGGRREIQVFRTWKSTCTYSTFLSNKVPVCCVSLSTFYSPTITTCPQCSCGCRDANPSTDSCIREGSSLSQLSSSGKLDIVQCTDHMCPIRVHWHVKNNYMSHWRVKLTISNYNLAKNYSDWNILVQHPGFSQNTTTYSFNSTALPTVGFADEIALFWGVTFYNNELLHADDKKLGSVTTEILLGKDSNSFTLNGGWAFPRRIYFNGENCEMPLPDTYPMLPNGSSTQKLTHPQFFLLLLCLTVKVLAIWL

SEQ ID NO: 208 - DNA, 576 bp, Arabidopsis thaliana
  misc_feature 1..576: note = Ceres Annot ID no. 847799
  misc_feature 1..576: note = Encodes the peptide sequence at SEQ ID NO. 209
  source 1..576: mol_type = unassigned DNA
atgtcttcggatcgtcacacaccgacgaaagatccaccggatcatccgtcttcttcctccaaccaccacaagcaaccacttcctcctcaaccgcagcaaccactcagccgctatgaatcgcagaaacgccgcgactggaacacgttcgtccaatacctaaaatcacaaaatccaccgttgatgatgtctcaattcgactacacgcacgtgctaagtttcctaaggtacttagatcagtttggtaagaccaaagtacatcatcaagcttgtgtcttcttcggacaaccggatccaccaggtccgtgcacgtgtcctctcaaacaagcttggggaagcctagatgctttgatcggacggctaagagctgcttacgaggaacacggtggcgggtcacctgatactaacccgtttgcaaacgggtcgatccgggttcacttgagggaagtgagagaatctcaagccaaggctcgtgggattccgtacaggaagaagaaaaggaggaagactaaaaacgaggtcgttgttgtcaagaaggatgttgcaaactcttcgactcctaatcagtcgttcacttga

SEQ ID NO: 209 - protein, 191 aa, Arabidopsis thaliana
  REGION 19..152: note = Pfam Name: DUF640 Pfam Description: Protein of unknown function (DUF640)
  REGION 1..191: note = Ceres Annot ID no. 847799
  REGION 1..191: note = Locus ID no. At4G18610
  REGION 1..191: note = Bit score of 353.9 for HMM based on sequences of Figure 10
MSSDRHTPTKDPPDHPSSSSNHHKQPLPPQPQQPLSRYESQKRRDWNTFVQYLKSQNPPLMMSQFDYTHVLSFLRYLDQFGKTKVHHQACVFFGQPDPPGPCTCPLKQAWGSLDALIGRLRAAYEEHGGGSPDTNPFANGSIRVHLREVRESQAKARGIPYRKKKRRKTKNEVVVVKKDVANSSTPNQSFT

SEQ ID NO: 210 - protein, 226 aa, Picea sitchensis
  REGION 25..157: note = Pfam Name: DUF640 Pfam Description: Protein of unknown function (DUF640)
  REGION 1..226: note = Public GI ID no. 116780542
  REGION 1..226: note = Bit score of 354.7 for HMM based on sequences of Figure 10
  REGION 1..226: note = Functional Homolog Of SEQ ID NO. 209
MSAEVVVGQGGSSATAAQLAPSSSSNGINEGSRELAASPAPSRYESQKRRDWNTFGQYLKNHRPPLALPRCSGAHVVEFLHYLDQFGKTKVHVPACPFFGHPHPPAPCACPLRQAWGSLDALIGRLRAAYEENGGKPESNPFGARAVRLYLREVRESQAKARGIAYEKRNASAPQFNSNNSSSNNMYSSTSTSTSTSTSTSSISSTSTSSKLRLTLCPTIPIQMSL

SEQ ID NO: 211 - DNA, 919 bp, Gossypium hirsutum
  misc_feature 1..919: note = Ceres Clone ID no. 1848017
  misc_feature 1..919: note = Encodes the peptide sequence at SEQ ID NO. 212
  source 1..919: mol_type = unassigned DNA
attcctttcacctcccctttccccagcccccttataatttcttcttgccttatttagcaaaagataattaatcaatctgcctcgatctcaacaatatgtcgagtgaaagagggaaggatatagcggaaggaccatcaagggttaatcccggtgatcaacagctgcccccaacacctagccgctatgagtcacagaagagaagggactggaatactttcgggcagtacctgaagaaccagaggcccccagttcctctttctcagtgcaactgcaaccatgtgctggacttccttcgatatctggatcagttcggaaagaccaaggttcacctgcagggatgcatgttctatggacagcctgagccgcctgctccttgcacatgcccccttaggcaagcctggggcagcctcgatgctctaattgggaggcttcgagctgcttatgaagagaatggagggtcacctgagaccaacccttttgccagcggtgctattcgggtttatctcagagaggtcagggagtgtcaagccaaggcaagggggatcccttataagaagaaaaagaagaagccgcatcaaggcaagggaggtgatgaatccagctccaccattcacttctcttaatctttggacgatgtatgggattacatgagaaaaagaatcaaatggaagggaatataatatgataaaatccatcgaagattcagctcagtttgggggtttcggccttctttattagtatttttctttttcggtatttggcaatagctataatgaagggatcagttgagtgtacataactctcttgatcagtttctactttgtttgcgttttctcttttcatgaatgtccattttatgtctaagcttcctacgcaaaacattcatatcgtattgataataattagtcattttagtcgt

SEQ ID NO: 212 - protein, 175 aa, Gossypium hirsutum
  REGION 11..143: note = Pfam Name: DUF640 Pfam Description: Protein of unknown function (DUF640)
  REGION 1..175: note = Ceres Clone ID no. 1848017
  REGION 1..175: note = Bit score of 373.1 for HMM based on sequences of Figure 10
  REGION 1..175: note = Functional Homolog Of SEQ ID NO. 209
MSSERGKDIAEGPSRVNPGDQQLPPTPSRYESQKRRDWNTFGQYLKNQRPPVPLSQCNCNHVLDFLRYLDQFGKTKVHLQGCMFYGQPEPPAPCTCPLRQAWGSLDALIGRLRAAYEENGGSPETNPFASGAIRVYLREVRECQAKARGIPYKKKKKKPHQGKGGDESSSTIHFS

SEQ ID NO: 213 - DNA, 534 bp, Populus balsamifera
  misc_feature 1..534: note = Ceres Annot ID no. 1466494
  misc_feature 1..534: note = Encodes the peptide sequence at SEQ ID NO. 214
  source 1..534: mol_type = unassigned DNA; note = Populus balsamifera subsp. trichocarpa
atgtcaggtgatcaaaggcctaaagattctgctgagggctcttcacgatctggcggcgatcactaccagcctcaaccggctcctttgagcaggtatgagtcgcagaaacggcgagactggaacacttttgggcagtacttgaagaatcagagacccccagtttcactatctcagagtaattgcaaccacgtccttgatttccttcggtatctcgatcagtttggcaagactaaggtccatctacatggctgtgtcttttttggacaacctaatcctcctgctccttgtacctgccctctaaggcaagcttggggaagccttgatgccctaatcggacggcttcgagcagcttatgaggagcatggaggatctgcagagactaacccttttggaaatggagctattcgggtttatttgcgtgaagtgaaagagtgccaagctaaggcaagggggattccatacaagaagaaaacgaagaagaagactcaaataagggcaagaaatgaagcgaagcctcctatgcagtcagcttaa

SEQ ID NO: 214 - protein, 177 aa, Populus balsamifera
  REGION 13..145: note = Pfam Name: DUF640 Pfam Description: Protein of unknown function (DUF640)
  REGION 1..177: note = Ceres Annot ID no. 1466494
  REGION 1..177: note = Bit score of 368.7 for HMM based on sequences of Figure 10
  REGION 1..177: note = Functional Homolog Of SEQ ID NO. 209
  source 1..177: note = Populus balsamifera subsp. trichocarpa
MSGDQRPKDSAEGSSRSGGDHYQPQPAPLSRYESQKRRDWNTFGQYLKNQRPPVSLSQSNCNHVLDFLRYLDQFGKTKVHLHGCVFFGQPNPPAPCTCPLRQAWGSLDALIGRLRAAYEEHGGSAETNPFGNGAIRVYLREVKECQAKARGIPYKKKTKKKTQIRARNEAKPPMQSA

SEQ ID NO: 215 - DNA, 534 bp, Populus balsamifera
  misc_feature 1..534: note = Ceres Annot ID no. 1449022
  misc_feature 1..534: note = Encodes the peptide sequence at SEQ ID NO. 216
  source 1..534: mol_type = unassigned DNA; note = Populus balsamifera subsp. trichocarpa
atgtcaggtgatcaaaggcctaaagattctgctgaaggctcttcgcgatctggaggcgatcaccaccagcttcaatcagctcctttgagccggtatgagtcgcagaaacggcgagactggaacactttcgggcagtacttgaagaatcagagacccccagtttcattatctcagtgtaattgcaatcatgtgcttgatttccttcggtatcttgatcagtttggcaagactaaggttcatctacatgggtgcgtcttctttggacaacctgatcctcctgctccttgtacatgccctctaaggcaagcttgggggagccttgatgccctaatcggacgccttcgagcagcttttgaggagcatggaggatcagcggagactaacccttttggaaatggagctattcgggtttatttgcgtgaagtgaaagagtgtcaagctaaggcaagagggattccttacaagaagaagaagaagaagaagactcaaataaggccaagagacgaagcaaagccttcgatgcagacagcttaa

SEQ ID NO: 216 - protein, 177 aa, Populus balsamifera
  REGION 13..145: note = Pfam Name: DUF640 Pfam Description: Protein of unknown function (DUF640)
  REGION 1..177: note = Ceres Annot ID no. 1449022
  REGION 1..177: note = Bit score of 365.2 for HMM based on sequences of Figure 10
  REGION 1..177: note = Functional Homolog Of SEQ ID NO. 209
  source 1..177: note = Populus balsamifera subsp. trichocarpa
MSGDQRPKDSAEGSSRSGGDHHQLQSAPLSRYESQKRRDWNTFGQYLKNQRPPVSLSQCNCNHVLDFLRYLDQFGKTKVHLHGCVFFGQPDPPAPCTCPLRQAWGSLDALIGRLRAAFEEHGGSAETNPFGNGAIRVYLREVKECQAKARGIPYKKKKKKKTQIRPRDEAKPSMQTA

SEQ ID NO: 217 - DNA, 531 bp, Populus balsamifera
  misc_feature 1..531: note = Ceres Annot ID no. 1482911
  misc_feature 1..531: note = Encodes the peptide sequence at SEQ ID NO. 218
  source 1..531: mol_type = unassigned DNA; note = Populus balsamifera subsp. trichocarpa
atgtcaagcaataaagggaaagatgtagcggaaggttcatcaagagctgttgctatggctcccgatcagcaaaatccacctcccttgagtcgatacgaatcgcagaagaggcgcgattggaacacctttggtcagtacttgaggaaccagagacccccagttgcattatcacagtgcaacgcaaatcatgtgcttgaatttcttcgatacctcgatcaatttggcaagactaaggtgcacttacaagggtgtgtcttttttggacaacctgagccgccagggccctgtacttgcccacttaagcaagcctggggtagccttgatgcactcatcggccggcttagggctgcttatgaagaaaatggtggcttgcctgagacaaacccttttgcaagtggtgctattagagtatatctacgtgaagtgagggactctcaggccaaggcaagaggaattccttataagaagaagaagaagaagaggaatccgatgaaagctaacgatgagagctcaagctttcatatgcagtaa

SEQ ID NO: 218 - protein, 158 aa, Populus balsamifera
  REGION 1..127: note = Pfam Name: DUF640 Pfam Description: Protein of unknown function (DUF640)
  REGION 1..158: note = Ceres Annot ID no. 1482911
  REGION 1..158: note = Bit score of 378.4 for HMM based on sequences of Figure 10
  REGION 1..158: note = Functional Homolog Of SEQ ID NO. 209
  source 1..158: note = Populus balsamifera subsp. trichocarpa
MAPDQQNPPPLSRYESQKRRDWNTFGQYLRNQRPPVALSQCNANHVLEFLRYLDQFGKTKVHLQGCVFFGQPEPPGPCTCPLKQAWGSLDALIGRLRAAYEENGGLPETNPFASGAIRVYLREVRDSQAKARGIPYKKKKKKRNPMKANDESSSFHMQ

SEQ ID NO: 219 - DNA, 799 bp, Brassica napus
  misc_feature 1..799: note = Ceres Clone ID no. 1118987
  misc_feature 1..799: note = Encodes the peptide sequence at SEQ ID NO. 220
  source 1..799: mol_type = unassigned DNA
aaattctcgattcgcttatattctcaaaaccaacgctaaataaaaacactctcaaagaaaaacaaaaaaaaaaccctagttttgatggaatcgactgattcggggtcacaacaacatggaggtgacccaggtccgtcctccgtaacgccctcttcacctccggcgacgccgcctagcaggtacgagtcgcaaaaacgacgtgactggaacacgttcttgcagtacctcaagaaccacaagccgcctctcgcgttatcacgatgtagcggagcgcacgtgatcgagttcctcaagtacctagatcagttcggtaagaccaaagtccacgtggcgacctgcccttacttcggacatcagcagcctccctctccttgcgcttgtcctctcaagcaagcctggggatctctcgatgctctgatcggacggttgagagctgcgtacgaggagcacggtgggaggcctgattccaaccctttcgccgcacgtgcggtcaggatttacttgagagaagtcagagaaagtcaagccaaggcacgtgggattccatacgagaagaagaaacggaaacgggcaccaactgtcactaccgctagaattgacgttgctccgtcgagacaaagtgaaggaggtggtggttgtaacgacagtgatccgtctgtcgccgaagctgtaccgccttaaattaaattattatatcatattaattagttttcttgttatattaagcatggaactcacacctttcgtactataatgtattttatttttctatatgaactattaagagttttcttttgcc

SEQ ID NO: 220 - protein, 198 aa, Brassica napus
  REGION 13..146: note = Pfam Name: DUF640 Pfam Description: Protein of unknown function (DUF640)
  REGION 1..198: note = Ceres Clone ID no. 1118987
  REGION 1..198: note = Bit score of 367.1 for HMM based on sequences of Figure 10
  REGION 1..198: note = Functional Homolog Of SEQ ID NO. 209
MESTDSGSQQHGGDPGPSSVTPSSPPATPPSRYESQKRRDWNTFLQYLKNHKPPLALSRCSGAHVIEFLKYLDQFGKTKVHVATCPYFGHQQPPSPCACPLKQAWGSLDALIGRLRAAYEEHGGRPDSNPFAARAVRIYLREVRESQAKARGIPYEKKKRKRAPTVTTARIDVAPSRQSEGGGGCNDSDPSVAEAVPP

SEQ ID NO: 221 - DNA, 828 bp, Brassica napus
  misc_feature 1..828: note = Ceres Clone ID no. 1073674
  misc_feature 1..828: note = Encodes the peptide sequence at SEQ ID NO. 222
  source 1..828: mol_type = unassigned DNA
acactctttctctcaatttctctctcttttaaaacactaatcactaaaatcttgattcactatatcgtcaaaaccaacgctaaatcaattaaactctctcaaagaaaacaagacaaagccctacttttgatggattcagggtcacaacgaccggggcctgttagcgaaggcgatccgggtccgtccatcgtaaccccctcttcaccgcctgcgacgcctagcaggtacgagtcgcagaaacgacgtgactggaccacgttcttgcagtacctcaagaaccacaagccgcctctttccttgtcacggtgtagcggagcacatgccatcgagttcctcaagtacttagatcagttcggtaagaccaaagtccacgtggcggcatgtccttactttggccatcagcaacctccgtctccttgcgcttgtcctctcaagcaagcctgggggtctctcgatgccctgatcggacggttgagagcagcctacgaagagaacggtggacggcccgagtcgaacccgttcgcggcacgtgcggttaggatttacttgagggaagtcagagaaagtcaagccaaggcccgtgggagaccctacgagaaaaagaaacggaaacggccaacaactgttaccaccgtgagagttgacgttgcttcgtcgagacaaagtgaaggagatggttgtaacatcggtgatccgtcgtatgtggccgaggctgtacctccttaattaagttattattattgtcatgatatattaaatacattatatatgtctggaactcacatcaccttcttgagttaactattgaaaatatttttgttctagttc

SEQ ID NO: 222 - protein, 198 aa, Brassica napus
  REGION 14..146: note = Pfam Name: DUF640 Pfam Description: Protein of unknown function (DUF640)
  REGION 1..198: note = Ceres Clone ID no. 1073674
  REGION 1..198: note = Bit score of 353.3 for HMM based on sequences of Figure 10
  REGION 1..198: note = Functional Homolog Of SEQ ID NO. 209
MDSGSQRPGPVSEGDPGPSIVTPSSPPATPSRYESQKRRDWTTFLQYLKNHKPPLSLSRCSGAHAIEFLKYLDQFGKTKVHVAACPYFGHQQPPSPCACPLKQAWGSLDALIGRLRAAYEENGGRPESNPFAARAVRIYLREVRESQAKARGRPYEKKKRKRPTTVTTVRVDVASSRQSEGDGCNIGDPSYVAEAVPP

SEQ ID NO: 223 - DNA, 939 bp, Brassica napus
  misc_feature 1..939: note = Ceres Clone ID no. 1084747
  misc_feature 1..939: note = Encodes the peptide sequence at SEQ ID NO. 224
  source 1..939: mol_type = unassigned DNA
acactctttctctcattttctctctcttttaaaacactaatcactaaaatcttgattcactgtatcctcaaaaccaactctaaatcaaactctctcaaagaaaacaagccaaagccctactttggatggattcagggtcacaacgaccggggcctgtcagcgaaggcgatccgggtccgtccatcgtaaccccctcttcaccgcctgcggcgcctagcaggtacgagtcacagaaacgacgtgactggaccacgttcttacagtacctcaagaaccacaagccgcctctttccttgtcacggtgtagcggggcacatgccatcgagttcctcaagtacttagatcagttcggtaagaccaaagtccacgtggcggcgtgtccttacttcggccatcagcaacctccgtctccttgcgcttgtcctctcaagcaagcctgggggtctctcgatgccctgatcggacggctgagagcagcctatgaggagaacggtggacggcccgagtcgaacccgttcgcggcacgtgcggtcaggatttacttgagggaagtcagagaaagtcaagccaaggcccgtgggagaccctacgagaaaaagaaacggaaacggccaacaactgttaccaccgtgagagttgacgttgctccgtcgagacaaagtgaaggagatggttgtaacatcggtgatccgtcgtctctggccgaggctgtacctccttaattacgttattattattgtcatgatatattaaatacattatacatgtctggaactcacatcaccaaaaaaaaactcacatcaccttcttgagttaactatcgaaaatatatttttgttctagttcagttgatctttgatgaattacgttcttgaatttttcttttaattcttatgaattccacacatttttaaggactaattaacgaggttttcattc

SEQ ID NO: 224 - protein, 198 aa, Brassica napus
  REGION 14..146: note = Pfam Name: DUF640 Pfam Description: Protein of unknown function (DUF640)
  REGION 1..198: note = Ceres Clone ID no. 1084747
  REGION 1..198: note = Bit score of 353.0 for HMM based on sequences of Figure 10
  REGION 1..198: note = Functional Homolog Of SEQ ID NO. 209
MDSGSQRPGPVSEGDPGPSIVTPSSPPAAPSRYESQKRRDWTTFLQYLKNHKPPLSLSRCSGAHAIEFLKYLDQFGKTKVHVAACPYFGHQQPPSPCACPLKQAWGSLDALIGRLRAAYEENGGRPESNPFAARAVRIYLREVRESQAKARGRPYEKKKRKRPTTVTTVRVDVAPSRQSEGDGCNIGDPSSLAEAVPP

SEQ ID NO: 225 - DNA, 1036 bp, Glycine max
  misc_feature 1..1036: note = Ceres Clone ID no. 536345
  misc_feature 1..1036: note = Encodes the peptide sequence at SEQ ID NO. 226
  source 1..1036: mol_type = unassigned DNA
ggtctatttgtctttctcttccttccccaccaaaatttccctttcacacttcacaaaaaagaaatactaaatgatttgtcagtagcagcaaacatgtccagcaagggaaaggagatagcagaaggatcatcaacaacaacaacagcaacaagatcctctcatggaggtgacgatcatcatcatcaccacaatcagcagcagcagcaacaacaacaacagttaccactgagtcgctatgagtctcagaagagaagggattggaacacttttggacagtacctgaggaaccaaaggcctccagtggcactttctcagtgcagctccaaccatgttcttgagttccttcgctacttggaccagtttgggaagaccaaagtgcactcacaagggtgcttgttctttgggcaaactgagccgccaggaccctgcacttgccctctcagacaagcttgggggagccttgatgcactcattggaagattgagagctgcatatgaagaaaatggaggccttcctgagaccaatccttttgcaagtggcaccataagagtctatcttagagaggtgagagattctcaggctaaggctagaggaatcccttataagaagaaaaagaagaagaggaatgttatcaggcccaacggagacacctcctcctcaaacttgcctatgcagtaataataattaaagaggagcatgtgatatctctaaattgtttcaaagtcgtgaatctgttgctaggccttggatataacttcagctgcaaacttggaattctggttataattgactatctggacatatccctgggtcaactttaacccttcggtggtctttatgtgtcaaggagtgtattttgttatttcgaatgagagtttagaatgaagttgacgaaaagtttaacattgggggtaagtccctgtattatatttacttatatatatttacactatcaagcatattatatagtcatgaaaataatgtgtatgatattgcatatggtattggtatcgtttgattaattctctgggaagct

SEQ ID NO: 226 - protein, 194 aa, Glycine max
  REGION 29..161: note = Pfam Name: DUF640 Pfam Description: Protein of unknown function (DUF640)
  REGION 1..194: note = Ceres Clone ID no. 536345
  REGION 1..194: note = Bit score of 370.0 for HMM based on sequences of Figure 10
  REGION 1..194: note = Functional Homolog Of SEQ ID NO. 209
MSSKGKEIAEGSSTTTTATRSSHGGDDHHHHHNQQQQQQQQQLPLSRYESQKRRDWNTFGQYLRNQRPPVALSQCSSNHVLEFLRYLDQFGKTKVHSQGCLFFGQTEPPGPCTCPLRQAWGSLDALIGRLRAAYEENGGLPETNPFASGTIRVYLREVRDSQAKARGIPYKKKKKKRNVIRPNGDTSSSNLPMQ

SEQ ID NO: 227 - DNA, 1127 bp, Glycine max
  misc_feature 1..1127: note = Ceres Clone ID no. 1650005
  misc_feature 1..1127: note = Encodes the peptide sequence at SEQ ID NO. 228
  source 1..1127: mol_type = unassigned DNA
attccttctctcactcaccctcttatttcttcccaaaactccatatacatccatatctctatagccattaattcttctaccatagcacacagttaccaaaccaaaacatgtctactcaaattcaaaatggttcttcctcctcatcacaacaaccactgagtcgctatgagtcacaaaagcggcgagactggaacacctttggacagtacctgaggaatcagagtcccccagttccactctctcagtgcaacttcaaccatgtgttggatttccttcggtacctcgatcaatttgggaaaaccaaggtccacttgcacggttgcatcttctttggccagcccacccctcctgcaccctgtgcctgccctctcaggcaagcatggggtagcctcgatgccctcataggccggcttcgcgctgcctatgaggagcatggcggatcgccagagactaatccctttggaggaggagccattcgggtgtacctgcgtgaggtcaaggagtgtcaggcaaaggctagagggatcccatataagaagaagaagaagaagagaaacccaattctcaaggggactcaaagagctaaagatatcgagcaacaagcttcttgagatgatatatatctatatatatatatatatatatatgatatgaacgggccatatacgagcgagttaattggatatagcagatttggcactttgaaaaaagagcatctcagctgcttggaccaaaaattgttacagaaaatcagtgatatttcactaagtagttcagaacagaaaaatccttttaggcccatttactcgcagtaaatcttaaaatgcatgttagagatgtacaaccttgtaacttcttctaacatatgagacctctactccaaaatagaaacaacaagaatggctggctttacattcttgcagtagtttttccttatagtactttcaagcattatcaactacgcaaatatatctaggcattatattgaaagagttggaatttacattaatttggattaattagtacgttgtagtatgatgtcttaatcttgatgtgaacttcttggatttcaacttgatgcatatactgctgaaaatattcaatgtaaacttaattagcagagttgc

SEQ ID NO: 228 - protein, 167 aa, Glycine max
  REGION 1..133: note = Pfam Name: DUF640 Pfam Description: Protein of unknown function (DUF640)
  REGION 1..167: note = Ceres Clone ID no. 1650005
  REGION 1..167: note = Bit score of 358.8 for HMM based on sequences of Figure 10
  REGION 1..167: note = Functional Homolog Of SEQ ID NO. 209
MSTQIQNGSSSSSQQPLSRYESQKRRDWNTFGQYLRNQSPPVPLSQCNFNHVLDFLRYLDQFGKTKVHLHGCIFFGQPTPPAPCACPLRQAWGSLDALIGRLRAAYEEHGGSPETNPFGGGAIRVYLREVKECQAKARGIPYKKKKKKRNPILKGTQRAKDIEQQAS

SEQ ID NO: 229 - DNA, 618 bp, Solanum lycopersicum
  misc_feature 1..618: note = Ceres Annot ID no. 8453882
  misc_feature 1..618: note = Encodes the peptide sequence at SEQ ID NO. 230
  source 1..618: mol_type = unassigned DNA
atgtcaaatgatcaaataataatcgaaggcgaaggaggaggaggaggaggagaaggatcatcatcgagatccaaaaccactatacttatagcaccatctgacgatcatcatcatcatcatcagctaccaccagtaccacctcaactgagtagatatgagtctcagaaacgtcgcgattggaatacttttggacaatacttgaaaaatcaaaggccacctgttcctttatcccagtgtaactataaccacgtgctagagtttctccgatacctagatcaatttggaaaaactaaggtacatttacatggttgccctttttttggtcaaccagagcctccagggccttgtacttgtcctcttagacaagcatggggaagtcttgatgcacttattggtaggcttagagctgcctatgaagaaaatggtggcttacctgagaataatccattcgcgagtggagctatacgcgtttatcttagagaggtaagagattttcaagctaaagcaagaggaatttgttataagaagaagaagaagaagaggaaaatgcaaaacaaacctacttctagtaatgctcatgagccaactacaactacctttcaattccaatcttcttga

SEQ ID NO: 230 - protein, 205 aa, Solanum lycopersicum
  REGION 33..165: note = Pfam Name: DUF640 Pfam Description: Protein of unknown function (DUF640)
  REGION 1..205: note = Ceres Annot ID no. 8453882
  REGION 1..205: note = Bit score of 374.4 for HMM based on sequences of Figure 10
  REGION 1..205: note = Functional Homolog Of SEQ ID NO. 209
MSNDQIIIEGEGGGGGGEGSSSRSKTTILIAPSDDHHHHHQLPPVPPQLSRYESQKRRDWNTFGQYLKNQRPPVPLSQCNYNHVLEFLRYLDQFGKTKVHLHGCPFFGQPEPPGPCTCPLRQAWGSLDALIGRLRAAYEENGGLPENNPFASGAIRVYLREVRDFQAKARGICYKKKKKKRKMQNKPTSSNAHEPTTTTFQFQSS

SEQ ID NO: 231 - DNA, 639 bp, Oryza sativa
  misc_feature 1..639: note = Ceres Annot ID no. 1373087
  misc_feature 1..639: note = Encodes the peptide sequence at SEQ ID NO. 232
  source 1..639: mol_type = unassigned DNA
atggatccgtctggccccggtccgtcctctgcggcggctggcggcgcgccggccgtggcggcggcgccgcagccgccggcgcagctgagcaggtacgagtcgcagaagcggagggactggaacacgttcctgcagtacctgcggaaccaccggccgccgctgacgctggcgcggtgcagcggcgcgcacgtgatcgagttcctgaggtacctggaccagttcgggaagaccaaggtgcacgcgtcggggtgcgccttctacggccagcccagcccgccggggccgtgcccgtgcccgctgcgtcaggcgtggggatccctcgacgcgctcatcggccgcctccgcgccgcgtacgaggagagcggcggcacgcccgagtccaacccgttcgccgcgcgcgccgtccggatctacctccgcgaggtgcgggactcgcaggccaaggcgcgcggcatcccgtacgagaagaagaagcgcaagcgctcgcaggcggcgcagcccgccggcgtcgagccgtccggctcgtcttctgctgcagctgcagctgccggtggtggagacgcgggcagcggtggcggtgcagctgctactaccacagctcaacctggagggagtggcactgcaccaagcgcctcctga

SEQ ID NO: 232 - protein, 212 aa, Oryza sativa
  REGION 13..145: note = Pfam Name: DUF640 Pfam Description: Protein of unknown function (DUF640)
  REGION 1..212: note = Ceres Annot ID no. 1373087
  REGION 1..212: note = Bit score of 377.4 for HMM based on sequences of Figure 10
  REGION 1..212: note = Functional Homolog Of SEQ ID NO. 209
MDPSGPGPSSAAAGGAPAVAAAPQPPAQLSRYESQKRRDWNTFLQYLRNHRPPLTLARCSGAHVIEFLRYLDQFGKTKVHASGCAFYGQPSPPGPCPCPLRQAWGSLDALIGRLRAAYEESGGTPESNPFAARAVRIYLREVRDSQAKARGIPYEKKKRKRSQAAQPAGVEPSGSSSAAAAAAGGGDAGSGGGAAATTTAQPGGSGTAPSAS

SEQ ID NO: 233 - DNA, 648 bp, Sorghum bicolor
  misc_feature 1..648: note = Ceres Annot ID no. 8669372
  misc_feature 1..648: note = Encodes the peptide sequence at SEQ ID NO. 234
  source 1..648: mol_type = unassigned DNA
atggatccctccgggcctggcccgtcgtcggtcatgggggcagcaggcggcggcgaggcaccggccgtggcgccgccgcgtccggcgcagctgagcaggtacgagtcgcagaagcggagggactggaacacgttcctgcagtacctgcgaaaccaccggccgccgctgacgctggcgcggtgcagcggcgcgcacgtgatcgagttcctccggtacctggaccagttcggcaagaccaaggtgcacgccgccgggtgcgcctactacggccagccggcaccgccggggccctgcccgtgcccgctgcgccaggcgtggggctccctcgacgcgctcatcggccgcctgcgcgcggcgtacgaggagagcggcggcacgcccgagtccaaccccttcgccgcgcgcgccgtgcggatctacctccgcgaggtgcgcgactcgcaggccaaggcgcgcggcatcccctacgagaagaagaagcgcaagcgcgcgcagcagcagcaggccgccgccgccgcggatcctgcttcgacgagctcgtccgctgctgctgccggcgggagcgggactagcggcagggctgctgctgcagctgccgcgtccgccgctcaggccggagggagtagcgctgcaccgagcaccacttga

SEQ ID NO: 234 - protein, 215 aa, Sorghum bicolor
  REGION 15..147: note = Pfam Name: DUF640 Pfam Description: Protein of unknown function (DUF640)
  REGION 1..215: note = Ceres Annot ID no. 8669372
  REGION 1..215: note = Bit score of 377.8 for HMM based on sequences of Figure 10
  REGION 1..215: note = Functional Homolog Of SEQ ID NO. 209
MDPSGPGPSSVMGAAGGGEAPAVAPPRPAQLSRYESQKRRDWNTFLQYLRNHRPPLTLARCSGAHVIEFLRYLDQFGKTKVHAAGCAYYGQPAPPGPCPCPLRQAWGSLDALIGRLRAAYEESGGTPESNPFAARAVRIYLREVRDSQAKARGIPYEKKKRKRAQQQQAAAAADPASTSSSAAAAGGSGTSGRAAAAAAASAAQAGGSSAAPSTT

SEQ ID NO: 235 - DNA, 1184 bp, Triticum aestivum
  misc_feature 1..1184: note = Ceres Clone ID no. 1048839
  misc_feature 1..1184: note = Encodes the peptide sequence at SEQ ID NO. 236
  source 1..1184: mol_type = unassigned DNA
attctctctctctctctcgctgcctggccaggtagcttctctctctcctccacgctcctgccgacaaaaacaagaaacgacgtagcacggtagcagcaaagagaaagagagagagaccactggtagccaagggtgggagagaagcaggagtgccgctgccgatcgaccatggagccgggccccgacgcgcctcgcggcgagggagcgagcgcgccggaggagtctggaccgtcctcatcctcggtggccgtggagaaagctgaagagccacaggcacaagcgcagccgccggaaggaggaggccagcaagtcgcactgcaggagcacctgcagccgcagccgctgtcgcagcagccgccggtgccagcggggctgagccgctacgagtcgcagaagcgccgcgactggaacacgttcctgcagtacctgcgcaaccacaagccgccgctgacactcgcgcggtgcagcggcgcgcacgtcatcgagttcctcaagtacctggaccagttcggcaagaccaaggtgcacgccgacggctgcgcctacttcggccagcccaacccgccggctccgtgcgcgtgcccgctccgacaggcatggggcagcctcgacgcgctcattggccgcctgcgcgccgcctacgaggagtccggcggccgccctgagtccaaccccttcgccgcgcgcgccgtgcgcatctatctgcgcgaggtgcgcgaggcgcaggccaaggcgcgcgggataccctacgagaagaagaagcgcaagcgcggcagcacgtccgcccccgcggcgccgcctcccgttgtcaccgccgcggaggcggcagcgacctccggaggcggcgaggacgacgaggacgagccgtcacagtccgctgagcaacagcacacaacgccagcgtctcctccgactagaattagtagcgccggcgctactagtaccaccgcagcggcggcagccacaacgacgacgacgacaacgagagggaaggagaaggaagcggcagaaggatcagcgtgataagtgtagaccatcaaattacccttttgattattccatcgcatccaaattctaatctctgcaccatcataattttagttgtttgttattataattactgtgctgttatgatttgttggatatatatatatatataagagagaggtctaagtagttcgtac

SEQ ID NO: 236 - protein, 284 aa, Triticum aestivum
  REGION 51..185: note = Pfam Name: DUF640 Pfam Description: Protein of unknown function (DUF640)
  REGION 1..284: note = Ceres Clone ID no. 1048839
  REGION 1..284: note = Bit score of 373.6 for HMM based on sequences of Figure 10
  REGION 1..284: note = Functional Homolog Of SEQ ID NO. 209
MEPGPDAPRGEGASAPEESGPSSSSVAVEKAEEPQAQAQPPEGGGQQVALQEHLQPQPLSQQPPVPAGLSRYESQKRRDWNTFLQYLRNHKPPLTLARCSGAHVIEFLKYLDQFGKTKVHADGCAYFGQPNPPAPCACPLRQAWGSLDALIGRLRAAYEESGGRPESNPFAARAVRIYLREVREAQAKARGIPYEKKKRKRGSTSAPAAPPPVVTAAEAAATSGGGEDDEDEPSQSAEQQHTTPASPPTRISSAGATSTTAAAAATTTTTTTRGKEKEAAEGSA

SEQ ID NO: 237 - DNA, 1203 bp, Zea mays
  misc_feature 1..1203: note = Ceres Clone ID no. 281322
  misc_feature 1..1203: note = Encodes the peptide sequence at SEQ ID NO. 238
  source 1..1203: mol_type = unassigned DNA
agcttgattctctctggctggtacgcggtagcctcgctctctctcctacctacacggctacacttaaacggcagcaggcacctgcaggcagggagagctgctaacggaccgatcggggagctgctggccatggagcctggtccggatgcgcccgctggtggtggtggcggaggaggaaccagtattagtgagccagcagaggccgggccgtcgccgtcgtcgtcctcggccgccgcagcagcctcgtcgtcgagccggcagcaggcagagcaggaagcacagcagcaacaaggagcacagcagagggaacagccagcagtaagggcccaggcgcagccgcagccgcagccgcatcagcagcagcctccggcggggctcagccggtacgagtcgcagaagcgccgggactggaacacgttcctgcagtacctgcggaaccacaagccgccgctgacgctggcacgctgcagcggcgcacacgtcatcgagttcctccgctacctggaccagttcggcaagacgaaggtgcacgctgagggctgcgcctacttcgggcagccgaacccgccggcgccctgcacgtgcccgctgcgccaggcctggggtagcctcgacgcgctcatcggccgcctccgcgccgcgtacgaggagtccggcggccgccccgagtccaacccgttcgcggccaaggccgtgcgcatctacctccgcgacgtgcgggaggcgcaggccaaggcccgcggcatcccgtacgagaagaagaagcggaagcgcgggagcgccgccgcgcctccggtcgcgccgcctcctgttgtgactgcagaggccgccgggacgtcgtcaggggccggcggtggtgatgacgaggacgacgacgaaccaccgccatctgcagatgaaccacgacgacagcagaccgccgcgccgactcctcctcctcctgcaagtatgatttccagcactagtgcaagcagtagcagtgtcgccccagtcacgacgacgacgacgacaagcaaggagaaagaaggatccgcgccaagctcgtgataagtttgtagatcatctactagccttctgattcaattctatcatcgccggcctccaaattataatcccaaccgcctccatcttaaatttttagttgctcactattactatatattgttattgtttactggcatatataagagagaggtctaaggg

SEQ ID NO: 238 - protein, 305 aa, Zea mays
  REGION 67..199: note = Pfam Name: DUF640 Pfam Description: Protein of unknown function (DUF640)
  REGION 1..305: note = Ceres Clone ID no. 281322
  REGION 1..305: note = Bit score of 372.9 for HMM based on sequences of Figure 10
  REGION 1..305: note = Functional Homolog Of SEQ ID NO. 209
MEPGPDAPAGGGGGGGTSISEPAEAGPSPSSSSAAAAASSSSRQQAEQEAQQQQGAQQREQPAVRAQAQPQPQPHQQQPPAGLSRYESQKRRDWNTFLQYLRNHKPPLTLARCSGAHVIEFLRYLDQFGKTKVHAEGCAYFGQPNPPAPCTCPLRQAWGSLDALIGRLRAAYEESGGRPESNPFAAKAVRIYLRDVREAQAKARGIPYEKKKRKRGSAAAPPVAPPPVVTAEAAGTSSGAGGGDDEDDDEPPPSADEPRRQQTAAPTPPPPASMISSTSASSSSVAPVTTTTTTSKEKEGSAPSS

SEQ ID NO: 239 - protein, 175 aa, Vitis vinifera
  REGION 11..143: note = Pfam Name: DUF640 Pfam Description: Protein of unknown function (DUF640)
  REGION 1..175: note = Public GI ID no. 147795605
  REGION 1..175: note = Bit score of 380.4 for HMM based on sequences of Figure 10
  REGION 1..175: note = Functional Homolog Of SEQ ID NO. 209
  UNSURE 175: note = X is any aa, unknown, or other
MSNDRKRDSAEGSSRSTGEPQQQPQPLSRYESQKRRDWNTFGQYLKNQRPPVSLAQCSCNHVLEFLRYLDQFGKTKVHLHGCVFFGQPDPPAPCTCPLRQAWGSLDALIGRLRAAYEEHGGSPETNPFGNGAIRVYLREVRDCQSKARGIPYKKKKKKKNQIKPNNEAKSSKQSX

SEQ ID NO: 240 - DNA, 1062 bp, Panicum virgatum
  misc_feature 1..1062: note = Ceres Clone ID no. 2004419
  misc_feature 1..1062: note = Encodes the peptide sequence at SEQ ID NO. 241
  source 1..1062: mol_type = unassigned DNA
actcatcgcgatcgatcgctgctagctagctcccagctgcgattctgatccttcgtgctccctcagttgtcgtcgtcgctggctcgctcgcttgcttgccagctctctctctcatagtagctagctgcttgcatggatccgtccgggcccggcccgtcgccggtcgttggcggaggaggcggcggtgacgcgccggccgtggtgccgcagcagcggccggcgcagctgagcaggtacgagtcgcagaagcggcgggactggaacacgttcctgcagtacctgcggaaccaccgcccgccgctgacgctggcgcggtgcagcggcgcgcacgtgatcgagttcctcaggtacctggaccagttcggcaagaccaaggtgcacgccgccgggtgcgcctactacggccagcccgcgccgccggggccctgcccgtgcccactgcggcaggcctggggctccctcgacgcgctcatcggccgcctgcgcgccgcgtacgaggagagcggcggcacgcccgagtccaaccccttcgccgcgcgcgccgtgcggatctacctccgcgaggtgcgcgactcgcaggccaaggcgcgcggcatcccctacgagaagaagaagcgcaagcgcgcgcagcaggccgccgagccgtcgtcgagctcgtccgccgccccggccggtgggagcgggagcatcagcagagctgctgcgacggccgccgctcatcaggctggagggagcagcgctgcaccgagcaacacctgagtacagtagatctgcagatcttgtttaattatcgtctccgcatcgcaagatttgagcttagctttctactgcttttgctatatatatgtgctttgcgttgcttcttttctctgcccatttcatccttttcttaccagggttttggatccccctttttttttttccggtttattaggtcaagtatatggctagatattggagtagtagtagctgaaaggggaagaagttggcgattaatcggtgcaagggcaactgtgtgttcatgatctgatacatatatattaatatatatatgttcttggt

SEQ ID NO: 241 - protein, 208 aa, Panicum virgatum
  REGION 16..148: note = Pfam Name: DUF640 Pfam Description: Protein of unknown function (DUF640)
  REGION 1..208: note = Ceres Clone ID no. 2004419
  REGION 1..208: note = Bit score of 380.3 for HMM based on sequences of Figure 10
  REGION 1..208: note = Functional Homolog Of SEQ ID NO. 209
MDPSGPGPSPVVGGGGGGDAPAVVPQQRPAQLSRYESQKRRDWNTFLQYLRNHRPPLTLARCSGAHVIEFLRYLDQFGKTKVHAAGCAYYGQPAPPGPCPCPLRQAWGSLDALIGRLRAAYEESGGTPESNPFAARAVRIYLREVRDSQAKARGIPYEKKKRKRAQQAAEPSSSSSAAPAGGSGSISRAAATAAAHQAGGSSAAPSNT

SEQ ID NO: 242 - protein, 212 aa, Oryza sativa
  REGION 13..145: note = Pfam Name: DUF640 Pfam Description: Protein of unknown function (DUF640)
  REGION 1..212: note = Public GI ID no. 125543059
  REGION 1..212: note = Bit score of 377.9 for HMM based on sequences of Figure 10
  REGION 1..212: note = Functional Homolog Of SEQ ID NO. 209
  source 1..212: note = Oryza sativa subsp. indica
MDPSGPGPSSAAAGGAPAVAAAPQPPAQLSRYESQKRRDWNTFLQYLRNHRPPLTLARCSGAHVIEFLRYLDQFGKTKVHASGCAFYGQPSPPGPCPCPLRQAWGSLDALIGRLRAAYEESGGTPESNPFAARAVRIYLREVRDSQAKARGIPYEKKKRKRSQAAQPAGVEPSGSSSAAAAAAGGGDTGSGGGAAATTTAQPGGSGTAPSAS

SEQ ID NO: 243 - protein, 164 aa, Arabidopsis thaliana
  REGION 5..137: note = Pfam Name: DUF640 Pfam Description: Protein of unknown function (DUF640)
  REGION 1..164: note = Bit score of 285.6 for HMM based on sequences of Figure 10
  REGION 1..164: note = Locus ID NO. At1G16910
  REGION 1..164: note = Functional Homolog Of SEQ ID NO. 209
MTSTNTRNKGKCIVEGPPPTLSRYESQKSRDWNTFCQYLMTKMPPVHVWECESNHILDFLQSRDQFGKTKVHIQGCVFFGQKEPPGECNCPLKQAWGSLDALIGRLRAAYEENGGLTEKNPFARGGIRIFLREVRGSQAKARGVLYKKKKRLVVVGTGTSTTWT

SEQ ID NO: 244 - protein, 195 aa, Arabidopsis thaliana
  REGION 22..154: note = Pfam Name: DUF640 Pfam Description: Protein of unknown function (DUF640)
  REGION 1..195: note = Bit score of 323.0 for HMM based on sequences of Figure 10
  REGION 1..195: note = Locus ID NO. At1G78815
  REGION 1..195: note = Functional Homolog Of SEQ ID NO. 209
MASHSNKGKGIAEGSSQPQSQPQPQPHQPQSPPNPPALSRYESQKRRDWNTFCQYLRNQQPPVHISQCGSNHILDFLQYLDQFGKTKVHIHGCVFFGQVEPAGQCNCPLKQAWGSLDALIGRLRAAFEENGGLPERNPFAGGGIRVFLREVRDSQAKARGVPYKKRKKRKKRNPMKSHDGEDGTTGTSSSSNLAS

SEQ ID NO: 245 - protein, 219 aa, Arabidopsis thaliana
  REGION 36..168: note = Pfam Name: DUF640 Pfam Description: Protein of unknown function (DUF640)
  REGION 1..219: note = Bit score of 345.9 for HMM based on sequences of Figure 10
  REGION 1..219: note = Locus ID NO. At2G31160
  REGION 1..219: note = Functional Homolog Of SEQ ID NO. 209
MDMIPQLMEGSSAYGGVTNLNIISNNSSSVTGATGGEATQPLSSSSSPSANSSRYENQKRRDWNTFGQYLRNHRPPLSLSRCSGAHVLEFLRYLDQFGKTKVHTNICHFYGHPNPPAPCPCPLRQAWGSLDALIGRLRAAFEENGGKPETNPFGARAVRLYLREVRDMQSKARGVSYEKKKRKRPLPSSSTSSSSAVASHQQFQMLPGTSSTTQLKFEK

SEQ ID NO: 246 - protein, 177 aa, Arabidopsis thaliana
  REGION 7..139: note = Pfam Name: DUF640 Pfam Description: Protein of unknown function (DUF640)
  REGION 1..177: note = Bit score of 363.4 for HMM based on sequences of Figure 10
  REGION 1..177: note = Locus ID NO. At2G42610
  REGION 1..177: note = Functional Homolog Of SEQ ID NO. 209
MSSPRERGKSLMESSGSEPPVTPSRYESQKRRDWNTFGQYLKNQRPPVPMSHCSCNHVLDFLRYLDQFGKTKVHVPGCMFYGQPEPPAPCTCPLRQAWGSLDALIGRLRAAYEENGGPPETNPFASGAIRVYLREVRECQAKARGIPYKKKKKKKPTPEMGGGREDSSSSSSSFSFS

SEQ ID NO: 247 - protein, 201 aa, Arabidopsis thaliana
  REGION 15..147: note = Pfam Name: DUF640 Pfam Description: Protein of unknown function (DUF640)
  REGION 1..201: note = Bit score of 326.7 for HMM based on sequences of Figure 10
  REGION 1..201: note = Locus ID NO. At3G04510
  REGION 1..201: note = Functional Homolog Of SEQ ID NO. 209
MDLISQNHNNRNPNTSLSTQTPSSFSSPPSSSRYENQKRRDWNTFCQYLRNHHPPLSLASCSGAHVLDFLRYLDQFGKTKVHHQNCAFFGLPNPPAPCPCPLRQAWGSLDALIGRLRAAYEENGGAPETSPFGSRSVRIFLREVRDFQAKSRGVSYEKKRKRVNNKQITQSQPQSQPPLPQQPQQEQGQSMMANYHHGATQ

SEQ ID NO: 248 - protein, 195 aa, Arabidopsis thaliana
  REGION 30..162: note = Pfam Name: DUF640 Pfam Description: Protein of unknown function (DUF640)
  REGION 1..195: note = Bit score of 348.0 for HMM based on sequences of Figure 10
  REGION 1..195: note = Locus ID NO. At3G23290
  REGION 1..195: note = Functional Homolog Of SEQ ID NO. 209
MDHIIGFMGTTNMSHNTNLMIAAAATTTTTSSSSSSSSGGSGTNQLSRYENQKRRDWNTFGQYLRNHRPPLSLSRCSGAHVLEFLRYLDQFGKTKVHTHLCPFFGHPNPPAPCACPLRQAWGSLDALIGRLRAAFEENGGSPETNPFGARAVRLYLREVRDSQAKARGISYEKKKRKRPPPPLPPAQPAISSSPN

SEQ ID NO: 249 - protein, 190 aa, Arabidopsis thaliana
  REGION 7..139: note = Pfam Name: DUF640 Pfam Description: Protein of unknown function (DUF640)
  REGION 1..190: note = Bit score of 330.1 for HMM based on sequences of Figure 10
  REGION 1..190: note = Locus ID NO. At5G28490
  REGION 1..190: note = Functional Homolog Of SEQ ID NO. 209
MDLISHQPNKNPNSSTQLTPPSSSRYENQKRRDWNTFCQYLRNHRPPLSLPSCSGAHVLEFLRYLDQFGKTKVHHQNCAFFGLPNPPAPCPCPLRQAWGSLDALIGRLRAAYEENGGPPEANPFGSRAVRLFLREVRDFQAKARGVSYEKKRKRVNRQKPQTQPPLQLQQQQQQPQQGQSMMANYSGATV

SEQ ID NO: 250 - protein, 182 aa, Arabidopsis thaliana
  REGION 1..134: note = Pfam Name: DUF640 Pfam Description: Protein of unknown function (DUF640)
  REGION 1..182: note = Bit score of 338.4 for HMM based on sequences of Figure 10
  REGION 1..182: note = Locus ID NO. At5G58500
  REGION 1..182: note = Functional Homolog Of SEQ ID NO. 209
MEGETAAKAAASSSSSPSRYESQKRRDWNTFLQYLRNHKPPLNLSRCSGAHVLEFLKYLDQFGKTKVHATACPFFGQPNPPSQCTCPLKQAWGSLDALIGRLRAAFEEIGGGLPESNPFAAKAVRIYLKEVRQTQAKARGIPYDKKKRKRPHTDTATPIAGDGDDAEGSGGAALVVTAATTV

SEQ ID NO: 251 - protein, 196 aa, Arabidopsis thaliana
  REGION 13..145: note = Pfam Name: DUF640 Pfam Description: Protein of unknown function (DUF640)
  REGION 1..196: note = Bit score of 365.5 for HMM based on sequences of Figure 10
  REGION 1..196: note = Locus ID NO. At1G07090
  REGION 1..196: note = Functional Homolog Of SEQ ID NO. 209
MESADSGRSDPVKGDDPGPSFVSSPPATPSRYESQKRRDWNTFLQYLKNHKPPLALSRCSGAHVIEFLKYLDQFGKTKVHVAACPYFGHQQPPSPCSCPLKQAWGSLDALIGRLRAAYEENGGRPDSNPFAARAVRIYLREVRESQAKARGIPYEKKKRKRPPTVTTVRVDVASSRQSDGDPCNVGAPSVAEAVPP

SEQ ID NO: 252 - DNA, 449 bp, Arabidopsis thaliana
  misc_feature 1..449: note = Ceres Clone ID no. 1356785
  misc_feature 1..449: note = Encodes the peptide sequence at SEQ ID NO. 253
  source 1..449: mol_type = unassigned DNA
ggcatttttaagattcttttaattatatcagacagagagatatgacttttgtagttcgtcttcttgtgtgtctcttattgacgcttacaattacatcttctctagcccgcaaccctgtttccgtttcaggtgggtttgagaattctggattccaaaggagtttgttgatggtgaacgttgaggactacggtgacccatctgcaaatcctaagcacgaccccggcgttcctccgtcagcaaccggccaacgtgtcgtcggcagaggctgacgtaatgttttagttaacgcagaaggaaagaactcttcttgtttacattttcagtttgtctgagattaaatctcagttcatatagctttctctaatctgtctatatagatattttctcgtaatctccatacaacttcatttatttttttcttatggcaatgactttgtaccttattttcc

SEQ ID NO: 253 - protein, 75 aa, Arabidopsis thaliana [sequence omitted]

SEQ ID NO: 254 - DNA, 418 bp, Brassica napus
  misc_feature 1..418: note = Ceres Clone ID no. 951785
  misc_feature 1..418: note = Encodes the peptide sequence at SEQ ID NO. 255
  source 1..418: mol_type = unassigned DNA
ctgagtctctctgaccaaaggagagatgagttttgttgtacttcgtcttgctgtgtttcttctgttgacgcttacagttacatattcatcccctagttccgtttctgttccagttgttaagattggaatcgaaaggaggtcgttgatagtcaacgtcaaggattatgatggtccgtccgcaaacccaaaacacaatcccggcactcctccggttactaccagccaacgcagccccggcagagggtgacctacctctttaattaacccacaagggaagaagaaatgaatctctcagttttacatgttcagtttgtccgagatgaagtgaaatttctctgtttctacacctttctccaatatgtatattgatatcaatatgtgtcttagtcatttctcacacaatttcttataaataaag

SEQ ID NO: 255 - protein, 73 aa, Brassica napus
  REGION 1..73: note = Ceres Clone ID no. 951785
  REGION 1..73: note = Bit score of 188.0 for HMM based on sequences of Figure 6
  REGION 1..73: note = Functional Homolog Of SEQ ID NO. 253
MSFVVLRLAVFLLLTLTVTYSSPSSVSVPVVKIGIERRSLIVNVKDYDGPSANPKHNPGTPPVTTSQRSPGRG

SEQ ID NO: 256 - DNA, 228 bp, Populus balsamifera
  misc_feature 1..228: note = Ceres Annot ID no. 1440346
  misc_feature 1..228: note = Encodes the peptide sequence at SEQ ID NO. 257
  source 1..228: mol_type = unassigned DNA; note = Populus balsamifera subsp. trichocarpa
atggcatttggagttcgcttgtgtttgtgtctcctgcttgtctttgctgtaacatcttcagctcgaaacaccatttcattctcagataacgaaatggccttggctataaaggggaggtccttgaagattacactgaacgattacggtgacccaatagcaaaccgtgggcacgatccttcacaaagaaacaagaattggggtggcagcggcggtggccgtaaaggctga

SEQ ID NO: 257 - protein, 75 aa, Populus balsamifera
  REGION 1..75: note = Ceres Annot ID no. 1440346
  REGION 1..75: note = Bit score of 203.3 for HMM based on sequences of Figure 6
  REGION 1..75: note = Functional Homolog Of SEQ ID NO. 253
  source 1..75: note = Populus balsamifera subsp. trichocarpa
MAFGVRLCLCLLLVFAVTSSARNTISFSDNEMALAIKGRSLKITLNDYGDPIANRGHDPSQRNKNWGGSGGGRKG

SEQ ID NO: 258 - DNA, 448 bp, Brassica napus
  misc_feature 1..448: note = Ceres Clone ID no. 1085177
  misc_feature 1..448: note = Encodes the peptide sequence at SEQ ID NO. 259
  source 1..448: mol_type = unassigned DNA
aaaccaaaatgagatgagttttggagttcgtcttcttttgtttctcatactaacccttccacttgttacatcctctggccgcaacactctttgtgtttcaggaattgggaagacaggggtagcaaaaagattattgatggtgagcatcgaggattatggtgatccatctgcaaacaccagacacgatcccagcgttccaaccaatgcaaaggctgacacaacaccttaaaagtcgttgattttacttgtgtactctatgtttttttttggggtaaaattgtgtactctatgttgaatatatatgtaataatatctgctttgagcgagttgtattacagtcatctgagtagaaaacacgcaaaatcttgtgaaaaccatgtaagatatgtatcaatccaacactttggggacaataaggcatggttttggtgtcaacataaaacatgac

SEQ ID NO: 259 - protein, 71 aa, Brassica napus
  REGION 1..71: note = Ceres Clone ID no. 1085177
  REGION 1..71: note = Bit score of 80.7 for HMM based on sequences of Figure 6
  REGION 1..71: note = Functional Homolog Of SEQ ID NO. 253
MSFGVRLLLFLILTLPLVTSSGRNTLCVSGIGKTGVAKRLLMVSIEDYGDPSANTRHDPSVPTNAKADTTP

SEQ ID NO: 260 - DNA, 400 bp, Arabidopsis thaliana
  misc_feature 1..400: note = Ceres Clone ID no. 157151
  misc_feature 1..400: note = Encodes the peptide sequence at SEQ ID NO. 261
  source 1..400: mol_type = unassigned DNA
aaactgcaattggataaccacaaccagaatcgattttgaatcatcatttctataaatatatacgactcatacatacatatacatacctcttaaacaaaactgagatgagttttggaactcgtcttcttttgtttctcatactaacacttccacttgtaacatcttcatccccaaacactcttcatgtttcaggaattgtgaagacagggactacaagtagattcttgatgatgaccatcgaggattatgacgatccatctgcaaacaccagacacgatcccagcgttccgaccaatgcaaaggctgacacaacaccttaaaactcttctgggtttacttgtttagtctatgttgaataaataaatatatatataataatctctctcttttgactgagctc

SEQ ID NO: 261 - protein, 71 aa, Arabidopsis thaliana
  REGION 1..71: note = Ceres Clone ID no. 157151
  REGION 1..71: note = Bit score of 67.1 for HMM based on sequences of Figure 6
  REGION 1..71: note = Functional Homolog Of SEQ ID NO. 253
MSFGTRLLLFLILTLPLVTSSSPNTLHVSGIVKTGTTSRFLMMTIEDYDDPSANTRHDPSVPTNAKADTTP

SEQ ID NO: 262 - DNA, 1191 bp, Arabidopsis thaliana
  misc_feature 1..1191: note = Ceres Annot ID no. 544549
  misc_feature 1..1191: note = Encodes the peptide sequence at SEQ ID NO. 263
  source 1..1191: mol_type = unassigned DNA
atgtggctctctcatctcttcatgtccctctctaagctgacgtgtaatttctccattttctctgtctttatggcttgtggctctattggtatgtctcaagttagagatactccggttaaattgtttggctggacaattacaccggtttctcatgatccatactcttcttcgtcccatgttcttcctgattcttcctcgtcttcctcgtcttcttctctatcacttcgaccacacatgatgaataaccaatctgttactgacaatacaagtcttaagctgtcatctaatcttaacaacgagtcaaaagaaacatctgagaacagtgatgaccaacacagcgagatcacaacaattacatcggaagaagagaaaacaactgaactgaagaaaccagacaagattcttccatgtccgagatgcaacagcgcagacaccaaattctgttactacaacaactacaacgttaaccagccacgtcacttctgtagaaaatgccagaggtattggaccgctggtggatccatgaggatcgtcccggttggctcaggccgtcgcaagaacaagggatgggtttcttcagaccagtacctgcacatcacttccgaggatactgacaattacaatagctcctcaacaaagattctaagcttcgagtcttcggactctttggtaactgagaggcctaagcatcaatcaaacgaagtgaagataaacgctgaacctgtttcacaagaacccaacaacttccaagggttacttcctccccaagcatcccctgtttcgcctccttggccttaccaataccctccaaaccctagtttctaccacatgcccgtctactggggctgcgcgataccggtttggtctaccctcgacacttctacatgtcttgggaaaaggacaagagacgaaacttctcatgaaactgttaaagagagtaaaaatgcttttgagagaacaagcttgcttttggaatctcagagcatcaaaaatgaaacaagtatggctacaaataaccatgtgtggtatccagtaccgatgacccgcgagaagacacaagaattcagctttttcagtaatggagctgaaacaaagagcagcaacaacagattcgtccctgaaacgtatcttaacctgcaagcaaaccctgcagccatggcaagatctatgaacttcagagagagcatataa

SEQ ID NO: 263 - protein, 396 aa, Arabidopsis thaliana
  REGION 130..192: note = Pfam Name: zf-Dof Pfam Description: Dof domain, zinc finger
  REGION 1..396: note = Ceres Annot ID no. 544549
  REGION 1..396: note = Bit score of 808.2 for HMM based on sequences of Figure 2
MWLSHLFMSLSKLTCNFSIFSVFMACGSIGMSQVRDTPVKLFGWTITPVSHDPYSSSSHVLPDSSSSSSSSSLSLRPHMMNNQSVTDNTSLKLSSNLNNESKETSENSDDQHSEITTITSEEEKTTELKKPDKILPCPRCNSADTKFCYYNNYNVNQPRHFCRKCQRYWTAGGSMRIVPVGSGRRKNKGWVSSDQYLHITSEDTDNYNSSSTKILSFESSDSLVTERPKHQSNEVKINAEPVSQEPNNFQGLLPPQASPVSPPWPYQYPPNPSFYHMPVYWGCAIPVWSTLDTSTCLGKRTRDETSHETVKESKNAFERTSLLLESQSIKNETSMATNNHVWYPVPMTREKTQEFSFFSNGAETKSSNNRFVPETYLNLQANPAAMARSMNFRESI

SEQ ID NO: 264 - protein, 385 aa, Vitis vinifera
  REGION 114..176: note = Pfam Name: zf-Dof Pfam Description: Dof domain, zinc finger
  REGION 1..385: note = Public GI ID no. 157355009
  REGION 1..385: note = Bit score of 840.4 for HMM based on sequences of Figure 2
  REGION 1..385: note = Functional Homolog Of SEQ ID NO. 263
MLDFKDPAIKLFGKTISLPLNPHLSPTSPPPPPLSSTTSFPDDTSQGLQPPSQDQEFEGKEEDGTSRQTSEELKDPTASPGVSENPETPSADKETSKDGEQSEISGSQEKTLKKPDKILPCPRCNSMDTKFCYYNNYNVNQPRHFCKNCQRYWTAGGTMRNVPVGAGRRKNKNSSASQYPLQTARASAANGIHHPALGNNGTVLNFGSDAEKGNIAGLEPVVKNFQAFSPHVPCFPGASWSYPWNPAQWSSKIPPPAFCPPGFPISFYPAPAYWGCTVPGSWNIPCIPPTSSSPIHSALATNHNSPTLGKHARDGETLRIDDPNEAAKSSIWTTLGIKNDGSNGGSLLKAFQSKGDEKKRIAEMSPVLQANPAALSRSLNFHERA

SEQ ID NO: 265 - DNA, 1491 bp, Populus balsamifera
  misc_feature 1..1491: note = Ceres Annot ID no. 1464457
  misc_feature 1..1491: note = Encodes the peptide sequence at SEQ ID NO. 266
  source 1..1491: mol_type = unassigned DNA; note = Populus balsamifera subsp. trichocarpa
atgtcggatttggcgatcaagttgtttgggaagacgattccactgcaagtcaatcagctggagggggatgtgtcttgtgctattaacaagcacgagtcttcctcaggaacaccagttgccccacccgagcctgaggagtactgttacactgctactacttgcttgcacgaaaaagacaaggaagagcaagaaggcaaccacagggagtcttcaggagaggaaattgccaacgagaaacaagaagatgttacctcgtgtcagatcaccgaggattcaaaagatccaacatcatcaggaattagtgagaatccaaagactccctcagttgagagggaaacttcatcactgaaaagcagtaaggatgaagaacaaagggagacaagcatctcacaagaaaagactctgaagaagcctgataaaatacttccatgccctcgatgtaatagcatggatactaaattctgttattacaacaattacaacgtcaatcagcctcgtcatttctgtaaaaagtgtcagagatactggactgctggaggaaccatgaggaatgtgcctgtgggagcaggacggcgcaagaataagagctcttcagcttcacattatcgtcacttaatggtatcagaagctctccgaacagttcaagtccatgccatgaatggagttcataacccctctttcggaaacaacaccactgtccttgcatttggttccgattctcctctttgtgattctgttgcctctgtgttgaatctttcagagaaaacgcaaaatagtgttcgaaatgagtatcacaggcctgaacatagaatctttgttccttgtggaggggcgggaagtaatggggatgatcgctcaagtggatctcccgccacagcttcggattcatcagagaagggatgtaatggtaattcgagagaagcagttaataaggattatcaatcctttcctccccaggttccctgcttccccgggcctccttggccatatcaatggaactctgcgctgcctccacctacgttttaccccccaggctttccagtatcgttttaccctgcaccaacttactggggttgtactgtcccgagcccttggaatgtaccgccatgtgtatcccctccatcaacctctctaaagcactgtaccctagactccagtcctacttctacactgggtaaacattcaagggatggcagcatccttcatccagcctacttaaaagagccctcgagggagggcaccaaatcagtaaaaggtgttttggttccgaagacatcgaggattgatgatcctagtgaagctgcaaagagctctatatgggcgaccctcgggatcatgagtgaaaaatccaattctattaatggaggaggtctctttaagggctttcaatcaaaaaacgaagacaaaaatgacatggctgggagaacttcagtgttgcaagcgaaccctgctgcattgtcccggtctctcaatttccatgagaacaattga

SEQ ID NO: 266 - protein, 496 aa, Populus balsamifera
  REGION 137..199: note = Pfam Name: zf-Dof Pfam Description: Dof domain, zinc finger
  REGION 1..496: note = Ceres Annot ID no. 1464457
  REGION 1..496: note = Bit score of 1090.1 for HMM based on sequences of Figure 2
  REGION 1..496: note = Functional Homolog Of SEQ ID NO. 263
  source 1..496: note = Populus balsamifera subsp. trichocarpa
MSDLAIKLFGKTIPLQVNQLEGDVSCAINKHESSSGTPVAPPEPEEYCYTATTCLHEKDKEEQEGNHRESSGEEIANEKQEDVTSCQITEDSKDPTSSGISENPKTPSVERETSSLKSSKDEEQRETSISQEKTLKKPDKILPCPRCNSMDTKFCYYNNYNVNQPRHFCKKCQRYWTAGGTMRNVPVGAGRRKNKSSSASHYRHLMVSEALRTVQVHAMNGVHNPSFGNNTTVLAFGSDSPLCDSVASVLNLSEKTQNSVRNEYHRPEHRIFVPCGGAGSNGDDRSSGSPATASDSSEKGCNGNSREAVNKDYQSFPPQVPCFPGPPWPYQWNSALPPPTFYPPGFPVSFYPAPTYWGCTVPSPWNVPPCVSPPSTSLKHCTLDSSPTSTLGKHSRDGSILHPAYLKEPSREGTKSVKGVLVPKTSRIDDPSEAAKSSIWATLGIMSEKSNSINGGGLFKGFQSKNEDKNDMAGRTSVLQANPAALSRSLNFHENN

SEQ ID NO: 267 - DNA, 1904 bp, Zea mays
  misc_feature 1..1904: note = Ceres Clone ID no. 1584660
  misc_feature 1..1904: note = Encodes the peptide sequence at SEQ ID NO. 268
  source 1..1904: mol_type = unassigned DNA
tcccgatcgatccatccatcgatcgcccacgcttccgtccatccagactccagagagataaaatctaattcctggacctggagtgcagaccgatcgccgccaccgccgccgcgttgtttcttgtctgcgcagctgtggtgatggtgcggtaaaagaaggctgctcgatcactccaacaaaaaaaaaaggtcgagatcgcacgcggcaggcgacaagcagtttccaaagagaagggaagcctagaggaagggagctagagatgggggagggcagagcaggagacggcctcatcaagctgttcgggaagaccatccccgtgccggagacggccgccgtcggcgaggctgccaaggacatgcaacaaagcggcggcagcggcagcggtacgactgatccgaaagggcaagagaacaacgttcaggactccacaggctcgcctccgcagcaggaggtcgcggacaccgaagactcgtcggcagacaaacagcagggcgaggcgggcaacccaaaggagaagctcaagaagcccgacaagatcctgccgtgcccgcggtgcaacagcatggacaccaagttctgctactacaacaactacaacatcaaccagccgcgccacttctgcaagaactgccagaggtactggactgccggcggtgccatgcgcaacgtgcccgtgggcgcaggccggcgcaagagcaagagcgcgtcggccacttcccacttcctccagagggtcagggccggtctgcccgtcgacccgctcgtctgcgcggcagccaagactaacggcacggtgctcagcttcggctctgccatgtccagcttagacctcacggagcagatgaaacagctcaaggaaaagctcgtcccgatagcgggggacgagcgctcagttgggtctcgcactcaaggaccttctgccaaggcagaagacccggaccggaaggagaatgttacagcagataaatccgcgagagttgttcagcatccatgcatgacgaacggggtggccatgtggccatttagctgtgcgccaccagtaccggcctctgcctgttacggcccaggcagcatcgcaatcccgttctacccggcagcagctgctgctgctgcctactggggttgcatggttccaggagcttggagtggcgcatggccgcctcactccggccagtccgagacgggctcgtccattacctccgcctctccagcagcatccaccaagtccaacatctgcttcacgccaggaaagcaccctagagaccgcgacgaggaaggaggcgccaaaggaaatggcaaggtgtgggtgcccaagatgatccggatcgacgacgtggacgaggtggccaggagctctatcctgtcgctaatcgggatcggcggcgacaaggcaggcaaagatggcggcagaggctgcaagctcgcaagggtttttgagcagaacgaagaggcggcaaggacggcaactcctcactcggcagccatcagcggcttgccgttcttgcaggggaacccagctgcgctctcgcggtcactgaccttccaggaggggtcttgagcctctcgctcgattcacagctgagaattttgtacattagagggttgtatgtaatctaatctaggtggggggtggggctcatagctgccagcggacattgaaactatacaatagatagatatttgtagatagccaatatatatgggtcgggggaggaaaaaaaggataatgagagcaagtccccttatttgtatatattataatggattggaatatttggttgccaagtggtcttccagcaatagcgccagatgttctgatccactggctgttggcccatcgatttcagtggacaaaagtggtccaccttattctgggaaatttcagcatatattcagtttgtttc

SEQ ID NO: 268 - protein, 432 aa, Zea mays
  REGION 89..151: note = Pfam Name: zf-Dof Pfam Description: Dof domain, zinc finger
  REGION 1..432: note = Ceres Clone ID no. 1584660
  REGION 1..432: note = Bit score of 940.2 for HMM based on sequences of Figure 2
  REGION 1..432: note = Functional Homolog Of SEQ ID NO. 263
MGEGRAGDGLIKLFGKTIPVPETAAVGEAAKDMQQSGGSGSGTTDPKGQENNVQDSTGSPPQQEVADTEDSSADKQQGEAGNPKEKLKKPDKILPCPRCNSMDTKFCYYNNYNINQPRHFCKNCQRYWTAGGAMRNVPVGAGRRKSKSASATSHFLQRVRAGLPVDPLVCAAAKTNGTVLSFGSAMSSLDLTEQMKQLKEKLVPIAGDERSVGSRTQGPSAKAEDPDRKENVTADKSARVVQHPCMTNGVAMWPFSCAPPVPASACYGPGSIAIPFYPAAAAAAAYWGCMVPGAWSGAWPPHSGQSETGSSITSASPAASTKSNICFTPGKHPRDRDEEGGAKGNGKVWVPKMIRIDDVDEVARSSILSLIGIGGDKAGKDGGRGCKLARVFEQNEEAARTATPHSAAISGLPFLQGNPAALSRSLTFQEGS

SEQ ID NO: 269 - protein, 476 aa, Oryza sativa
  REGION 103..165: note = Pfam Name: zf-Dof Pfam Description: Dof domain, zinc finger
  REGION 1..476: note = Public GI ID no. 115474149
  REGION 1..476: note = Bit score of 1037.6 for HMM based on sequences of Figure 2
  REGION 1..476: note = Functional Homolog Of SEQ ID NO. 263
  source 1..476: note = Oryza sativa subsp. japonica
MDDLAAASPPHPPPPPPESHVPPPPQTPEKDSCEDTGDMRISEEKPCTDQELDADQMNSSSFNSSSECENQTPSNDEMTGSESKSEAAQTEGGGSSEEKVLKKPDKILPCPRCNSMDTKFCYYNNYNINQPRHFCKSCQRYWTAGGSMRNLPVGAGRRKSKSSTANYRSILITGSNLAAPAGDAPLYQLSIKGDQTATAVKFAPDSPLCNSMASVLKIGEQSKNAKPTSTAQPRNGETQTCPASGTTSDSPRNEPVNGAVSGHQNGIVGHSGVPPMHPIPCFPGPPFVYPWSPAWNGIPAMAPPVCTAPAEPANSSDNGSTASVQWSMPPVMPVPGYFPVIPSSVWPFISPWPNGAWSSPWIQPNCSVSASSPTSTSTCSDNGSPVLGKHSRDSKPQGDDKAEKNLWIPKTLRIDDPDEAAKSSIWTTLGIEPGDRSMFRSFQSKPESREQISGAARVLQANPAALSRSQSFQETT

SEQ ID NO: 270 - DNA, 1560 bp, Sorghum bicolor
  misc_feature 1..1560: note = Ceres Annot ID no. 8636233
  misc_feature 1..1560: note = Encodes the peptide sequence at SEQ ID NO. 271
  source 1..1560: mol_type = unassigned DNA
atggatgcgggcaccgctcgacagttggagacgatcaaggtgatgagtgtcgtagcggtgtcgagtgtacccctgtgtttggagaagttgagtgcgtacctcgacgagaaacgtgttgcggttggcaagcttggtgtcgatggtcagcagcagcaagcaaagccgggagcttgtgtttgtttggatcggagtgagaagaagatgatggcggagtgccaaggaggaggaggaggggatttcctcatcaagctcttcgggaagaccatccccgtgccggagtccggcgacgccaaggagaacccgcacccggactcctccgacccgtccccgcagccggaggtcgtggacgcagaggaccccaagagctcaccggagacgacacaccagaagcccggccagggcaacggcagcggcgacgctgccagccagagggagaagctgaagaagcccgacaaggtgctgccatgcccgcgctgcaacagcatggacaccaagttctgctacttcaacaactacaacgtcaaccagccgcgccacttctgcaagaactgccagcgctactggaccgccggcggcgccatgcgcaacgttcccgtcggggccggtcgccgcaagaacaagaacgccgtcgccgcctcgcacttcctccacagggtcggggcggcctgcggcggcggcggcgacacgctcaagacgaccaacggcacggtgctcagcttcggcggccatggtggcggctgcgtgcctcctggtcctgcatgcttggacctcgtcgagcagctcagccaccacctggcggccccggtgatcaggaacgccggcaacaacccgggtccttgcagcgaaggatcgagcaactgcagggacgacaacaagaccatcaacgacaggtcttgtgtagacgaagccgcagcagcaaacggagacgacggatcagtgcagcacccagcaagcatgaacaacggcggcgcaaccgtgtggccgccgccgtacagctgcgcgccatctccggcggcgtatttctcctcgggcatcgcgatcccgatatacccagccgcaccaggttactggggctgcatggttcccggagcttggagcctgccatggccggtgcaacagcccccgtcgtcgcagtcgcaggggccggcggcgggcctctcgtcgtcgacgtcgcccaccaccaccagtgctccttcggtctcatcatccggggcagccgactcccacacgctggggctgggcaagcacccccgggaccgggaggagggtgacgacgggagaaacgccaaggtgtgggctcccaagaccatccggatagacgacgtggacgaggtggccaggagctccatctggtcgctcatcgggatcaaaggcgacaaggcgaagcagcaggacgacgatgctgctggtgggcacaagcagaagcagcttgttgggatggtgttcgagcccaagcgcgaggccaccaagaagccggcggccatgatgacaagctcgccgctcctgcacgccaaccccgtcgcgctcacgcgctccgtggccttccaggagggctcttga

SEQ ID NO: 271 - protein, 519 aa, Sorghum bicolor
  REGION 149..211: note = Pfam Name: zf-Dof Pfam Description: Dof domain, zinc finger
  REGION 1..519: note = Ceres Annot ID no. 8636233
  REGION 1..519: note = Bit score of 999.7 for HMM based on sequences of Figure 2
  REGION 1..519: note = Functional Homolog Of SEQ ID NO. 263
MDAGTARQLETIKVMSVVAVSSVPLCLEKLSAYLDEKRVAVGKLGVDGQQQQAKPGACVCLDRSEKKMMAECQGGGGGDFLIKLFGKTIPVPESGDAKENPHPDSSDPSPQPEVVDAEDPKSSPETTHQKPGQGNGSGDAASQREKLKKPDKVLPCPRCNSMDTKFCYFNNYNVNQPRHFCKNCQRYWTAGGAMRNVPVGAGRRKNKNAVAASHFLHRVGAACGGGGDTLKTTNGTVLSFGGHGGGCVPPGPACLDLVEQLSHHLAAPVIRNAGNNPGPCSEGSSNCRDDNKTINDRSCVDEAAAANGDDGSVQHPASMNNGGATVWPPPYSCAPSPAAYFSSGIAIPIYPAAPGYWGCMVPGAWSLPWPVQQPPSSQSQGPAAGLSSSTSPTTTSAPSVSSSGAADSHTLGLGKHPRDREEGDDGRNAKVWAPKTIRIDDVDEVARSSIWSLIGIKGDKAKQQDDDAAGGHKQKQLVGMVFEPKREATKKPAAMMTSSPLLHANPVALTRSVAFQEGS

SEQ ID NO: 272 - DNA, 1567 bp, Panicum virgatum
  misc_feature 1..1567: note = Ceres Clone ID no. 1777035
  misc_feature 1..1567: note = Encodes the peptide sequence at SEQ ID NO. 273
  source 1..1567: mol_type = unassigned DNA
agccacagcacagcacggcacggccggtctctccttcttcttcttcttccccggcgccagcggacctgcgggacctcgtcgtcgtcggccgatccttcactggcagggcagcagcgagctgcaattaacggcggcggcggaggatcggggaggaggacgacgaagatggtggtggagtccgcggggggcggcggaggggactgcctcatcaagctgttcgggaagaccatccccgtgccggaggccgccgccgacaaggagagcggcagcagcatcagctcctgcaccgaatccgacaccccggagaacgcctcggagccgtccccgcagccggaggtcatggacgccgaggaccccaagagctcgccggagacgcagccgccgcccggcgccggcgacttggccgggcagagggagaagctcaagaggcccgacaaggtgctgccgtgcccgcgctgcaacagcatggacaccaagttctgctacttcaacaactacaacgtcaaccagccgcgccacttctgcaagaactgccagcgctactggaccgccggcggtgccatgcgcaacgtgcccgtcggcgccggccgccgcaagaacaagcacgccgtcgccgcctcccacttcctgcacagggtccgggccgcgctgcccgccgccgccggcgacccgctcagggccaacgccacggtgctcagcttcggcggccacggccacggcgcgcctcccgcggcgctgcaggacctcgccgagcaggtgacccacctgaaggagaagctgctcgtcccggcaaggaacgccggcgacccatcgccggtgggtccgtgcagcgaaggaccaagcagcacggacgacaaggcccatggcggcggcatcaaggagaagcccgccgtagacaggcctgcaaacggagcgccgcagcttccggcaagcatgaacggagcaaccgtgtggccgtacggcggctgcgcgccatctccggcggcgtatttctcgtcgggcatcgcgattccgatatacccggccgcaccgggttactggggctgcatggttcccgcccccggaccttggagcctgccatggtcggtgcagggcctctcgttgcccaccagtgctccttcactcccgtcatcggggcctgaccccgacctcacgctgggcaagcaccccagggagggggacgaggggagaagcgcccatggtggtggcaaggtgtgggcgcccaagacgatccggatcgacgacgccgacgaggtggccaggagctcgatctggtccctcatcgggatcaaaggcgacaggaagcaggacgccgcggatcatcacggcgctgccgggcacaagcacgggacggtgttcgagcagaagcgggaggccaagaagcaaccggcgatgatcgcaagctcgccgctcctgcacaccaaccccgtcgcgctgacacgctcggtgaccttccaggagggatcttgaagcccatcgatcggcactactgaaatttttgtaaatcagagagaggattgtaatataggtattggggggaagaaggaaacagagtgagtgtatgtgt

SEQ ID NO: 273 - protein, 434 aa, Panicum virgatum
  REGION 88..150: note = Pfam Name: zf-Dof Pfam Description: Dof domain, zinc finger
  REGION 1..434: note = Ceres Clone ID no. 1777035
  REGION 1..434: note = Bit score of 965.1 for HMM based on sequences of Figure 2
  REGION 1..434: note = Functional Homolog Of SEQ ID NO. 263
MVVESAGGGGGDCLIKLFGKTIPVPEAAADKESGSSISSCTESDTPENASEPSPQPEVMDAEDPKSSPETQPPPGAGDLAGQREKLKRPDKVLPCPRCNSMDTKFCYFNNYNVNQPRHFCKNCQRYWTAGGAMRNVPVGAGRRKNKHAVAASHFLHRVRAALPAAAGDPLRANATVLSFGGHGHGAPPAALQDLAEQVTHLKEKLLVPARNAGDPSPVGPCSEGPSSTDDKAHGGGIKEKPAVDRPANGAPQLPASMNGATVWPYGGCAPSPAAYFSSGIAIPIYPAAPGYWGCMVPAPGPWSLPWSVQGLSLPTSAPSLPSSGPDPDLTLGKHPREGDEGRSAHGGGKVWAPKTIRIDDADEVARSSIWSLIGIKGDRKQDAADHHGAAGHKHGTVFEQKREAKKQPAMIASSPLLHTNPVALTRSVTFQEGS

SEQ ID NO: 274 - DNA, 1719 bp, Panicum virgatum
  misc_feature 1..1719: note = Ceres Clone ID no. 1990929
  misc_feature 1..1719: note = Encodes the peptide sequence at SEQ ID NO. 275
  source 1..1719: mol_type = unassigned DNA
agccacagcacagcacggcacggccggtctctccttcttcttcttcttcttcttctcccccggcgccagcggacctgcgggacctcgtcgtcgtcggccgatccttcactggcagggcagcagcgagctgcaattaacggcggcggcggaggatcggggaggaggacgacgaagatggtggtggagtccgcggggggcggcggaggggactgcctcatcaagctgttcgggaagaccatccccgtgccggaggccgccgccgacaaggagagcggcagcagcatcagctcctgcaccgaatccgacaccccggagaacgcctcggagccgtccccgcagccggaggtcgtggacgccgaggaccccaagagctcgccggagacgcagccgccgcccggcgccggcgacttggccgggcagagggagaagctcaagaggcccgacaaggtgctgccgtgcccgcgctgcaacagcatggacaccaagttctgctacttcaacaactacaacgtcaaccagccgcgccacttctgcaagaactgccagcgctactggaccgccggcggcgccatgcgcaacgtgcccgtcggcgccggccgccgcaagaacaagcacgccgtcgccgcctcccacttcctgcacagggtccgggccgcgctgcccgccgccgccggcgacccgctcagggccaacgccacggtgctcagcttcggcggccacggccacggcgcgcctcccgcggcgctgcaggacctcgccgagcaggtgacccacctgaaggagaagctgctcgtcccggcaaggaacgccggcgacccatcgccggtgggtccgtgcagcgaaggaccaagcagcacggacgacaaggcccatggcggcggcatcaaggagaagcccgccgtagacaggcctgcaaacggagcgccgcagcttccggcaagcatgaacggagcaaccgtgtggccgtacggcggctgcgcgccatctccggcggcgtatttctcgtcgggcatcgcgattccgatatacccggccgcaccgggttactggggctgcatggttcccgcccccggaccttggagcctgccatggtcggtgcagggcctctcgttgcccaccagtgctccttcactctcgtcatcggggcctgaccccgacctcacgctgggcaagcaccccagggagggggacgaggggagaagcgcccatggtggtggcaaggtgtgggcgcccaagacgatccggatcgacgacgccgacgaggtggccaggagctcgatctggtccctcatcgggatcaaaggcgacaggaagcaggacgccgcggatcatcacggcgctgccgggcacaagcacgggacggtgttcgagcagaagcgggaggccaagaagcaaccggcgatgatcgcaagctcgccgctcctgcacaccaaccccgtcgcgctgacacgctcggtgaccttccaggagggatcttgaagcccatcgatcggcactactgaaatttttgtaaatcagagagaggattgtaatataggtattggggggaagaaggaaacagagtgagtgtatgtgtaacatagctacttgtggacttgtaataggtatagccgcatgtacatagaattagctatttgggttggagaaagaccaggagatcaatatggcccctggttgtagataatatataatatgaaggaggaatatattgcttgaagt

SEQ ID NO: 275 - protein, 434 aa, Panicum virgatum
  REGION 88..150: note = Pfam Name: zf-Dof Pfam Description: Dof domain, zinc finger
  REGION 1..434: note = Ceres Clone ID no. 1990929
  REGION 1..434: note = Bit score of 965.0 for HMM based on sequences of Figure 2
  REGION 1..434: note = Functional Homolog Of SEQ ID NO. 263
MVVESAGGGGGDCLIKLFGKTIPVPEAAADKESGSSISSCTESDTPENASEPSPQPEVVDAEDPKSSPETQPPPGAGDLAGQREKLKRPDKVLPCPRCNSMDTKFCYFNNYNVNQPRHFCKNCQRYWTAGGAMRNVPVGAGRRKNKHAVAASHFLHRVRAALPAAAGDPLRANATVLSFGGHGHGAPPAALQDLAEQVTHLKEKLLVPARNAGDPSPVGPCSEGPSSTDDKAHGGGIKEKPAVDRPANGAPQLPASMNGATVWPYGGCAPSPAAYFSSGIAIPIYPAAPGYWGCMVPAPGPWSLPWSVQGLSLPTSAPSLSSSGPDPDLTLGKHPREGDEGRSAHGGGKVWAPKTIRIDDADEVARSSIWSLIGIKGDRKQDAADHHGAAGHKHGTVFEQKREAKKQPAMIASSPLLHTNPVALTRSVTFQEGS

SEQ ID NO: 276 - protein, 432 aa, Zea mays
  REGION 89..151: note = Pfam Name: zf-Dof Pfam Description: Dof domain, zinc finger
  REGION 1..432: note = Public GI ID no. 194692166
  REGION 1..432: note = Bit score of 940.9 for HMM based on sequences of Figure 2
  REGION 1..432: note = Functional Homolog Of SEQ ID NO. 263
MGEGRAGDGLIKLFGKTIPVPETAAVGEAAKDMQQSGGSGSGTTDPKGQENNVQDSTGSPPQQEVADTEDSSADKQQGEAGNPKEKLKKPDKILPCPRCNSMDTKFCYYNNYNINQPRHFCKNCQRYWTAGGAMRNVPVGAGRRKSKSASATSHFLQRVRAGLPVDPLVCAAAKTNGTVLSFGSAMSSLDLTEQMKQLKEKLVPIAGDERSVGSRTQGPSAKAEDPDRKENVTADKSARVVQHPCMTNGVAMWPFSCAPPVPASACYGPGSIAIPFYPAAAAAAAYWGCMVPGAWSGAWPPHSGQSETGSSITSASPAASTKSNICFTPGKHPRDRDEEGGAKGNGKVWVPKTIRIDDVDEVARSSILSLIGIGGDKAGKDGGRGCKLARVFEQNEEAARTATPHSAAISGLPFLQGNPAALSRSLTFQEGS

SEQ ID NO: 277 - DNA, 1554 bp, Populus balsamifera
  misc_feature 1..1554: note = Ceres Annot ID no. 1458507
  misc_feature 1..1554: note = Encodes the peptide sequence at SEQ ID NO. 278
  source 1..1554: mol_type = unassigned DNA; note = Populus balsamifera subsp. trichocarpa
atgtcagatttggcgataaagctgtttggcaagacgattccactgcaagtcaatcagcaggaggatgtttcttgtgctgctaacaagtacgagtcctcctcaggaacgcctcccgagtccgaggactgttatgataatactgctactgcaacttcctcacaggaaaaccacaactctcataaggaacgaggagagcaagaagggaacaacaacagggggccacaagctctgtatcagtatttcactgttactttgcattttgaaacggagacttcaggagaggaaattgccaatgataaacaagaagatgttacctcgaatcagatcaacaaggactcaaaaggtccaacatcatcaggcattagtgagaacccaaagactccctcagctgagagggaaacttcatcactgaaaagcagcaagaatgaagaacaaagtgagacaagcatctcgcaagagaagactttgaagaagcctgacaaaatacttccatgccctcgatgtaatagcatggacactaaattctgttattacaacaattacaatgtcaatcagcctcgtcatttctgtaaaaactgtcagagatactggactgctggaggaaccatgaggaatgtgcctgtgggagctggaaggcgcaagaataagagctcttctgcttcacactatcgtcacttaatggtatcagaagctctccgaacagctcaagtccatgccatgaatggatttcataacccctctctgggaaacaacggcactgtccttacctttggttccgattctcctctttgtgaatctgttgcctctgtgttgaacctttcagagaaaacacaaaatagtgttcgaaacgggtatcatagacctgaacatagaatccttgtgtcttgtggagggacaggaggtgacggggatgatcactcaagtgtatcttccgccacggcttcaaattcatcagagaagggatgcaatggtacttcgcgagaagcggttaacaaggattatcaatcatttcctccccaggcaccctgcttcccggggcctccttggccatatccatggaactctgcgattactccacctacgttttgcccttcaggctttccagtatcgtttttccctgcaccagcttactggggttgtactgttccaagcccttggaatgtaccgccatgtgcatcctctccatcagccactctaaaccacagtacccaaagctccagtcctacttttccactggggaaacattcaagggatggcaacatccttaatccaccctgcttagaagagccctccagggacggcaccaaatcagaaacgggtgttttggttccaaagaccttgaggattgatgatcctagtgaagctgcaaagagctctatatgggcgaccctcgggatcacgaatgagaaatccagttctattaatggaggaggtctcttcaagggctttcagtcaaaaagcgaagacagaaattacatggcaggaacaacttcagtgttgcaagcgaaccctgctgcgttttcccggtctctcaatttccatgagaacacttga

SEQ ID NO: 278 - protein, 517 aa, Populus balsamifera
  REGION 158..220: note = Pfam Name: zf-Dof Pfam Description: Dof domain, zinc finger
  REGION 1..517: note = Ceres Annot ID no. 1458507
  REGION 1..517: note = Bit score of 885.6 for HMM based on sequences of Figure 2
  REGION 1..517: note = Functional Homolog Of SEQ ID NO. 263
  source 1..517: note = Populus balsamifera subsp. trichocarpa
MSDLAIKLFGKTIPLQVNQQEDVSCAANKYESSSGTPPESEDCYDNTATATSSQENHNSHKERGEQEGNNNRGPQALYQYFTVTLHFETETSGEEIANDKQEDVTSNQINKDSKGPTSSGISENPKTPSAERETSSLKSSKNEEQSETSISQEKTLKKPDKILPCPRCNSMDTKFCYYNNYNVNQPRHFCKNCQRYWTAGGTMRNVPVGAGRRKNKSSSASHYRHLMVSEALRTAQVHAMNGFHNPSLGNNGTVLTFGSDSPLCESVASVLNLSEKTQNSVRNGYHRPEHRILVSCGGTGGDGDDHSSVSSATASNSSEKGCNGTSREAVNKDYQSFPPQAPCFPGPPWPYPWNSAITPPTFCPSGFPVSFFPAPAYWGCTVPSPWNVPPCASSPSATLNHSTQSSSPTFPLGKHSRDGNILNPPCLEEPSRDGTKSETGVLVPKTLRIDDPSEAAKSSIWATLGITNEKSSSINGGGLFKGFQSKSEDRNYMAGTTSVLQANPAAFSRSLNFHENT

SEQ ID NO: 279 - protein, 475 aa, Vitis vinifera
  REGION 118..180: note = Pfam Name: zf-Dof Pfam Description: Dof domain, zinc finger
  REGION 1..475: note = Public GI ID no. 147780712
  REGION 1..475: note = Bit score of 829.6 for HMM based on sequences of Figure 2
  REGION 1..475: note = Functional Homolog Of SEQ ID NO. 263
METMLPLLVFLLSFVPLLIAYEKSANKLAFVARFYLLLQHKMAVKKHSGFLKHKPLEGQEFEGKEEDGTSRQTSEELKDPTASPGVSENPETPSADKETSKDGEQSEISGSQEKTLKKPDKILPCPRCNSMDTKFCYYNNYNVNQPRHFCKNCQRYWTAGGTMRNVPVGAGRRKNKNSSASQYRHIMVSEALQTARASAANGIHHPALGNNGTVLNFGSDGPLCESVASVLNLADKTQNCMQNGFHKSEQRIPASCGGGENGDDHSSITLTNSAEKGNIAGLEPVVKNFQAFPPHVPCFPGASWSYPWNPAQWSSKIPPPAFCPPGFPISFYPAPAYWGCTVPGSWNIPCIPPTSSSPIHSALATNHNSPTLGKHARDGEVLNPANPGKEDHQKENNPERGVWIPKTLRIDDPNEAAKSSIWTTLGIKNDGSNGGSLLKAFQSKGDEKKRIAEMSPVLQANPAALSRSLNFHERA

SEQ ID NO: 280 - DNA, 1275 bp, Sorghum bicolor
  misc_feature 1..1275: note = Ceres Annot ID no. 8642924
  misc_feature 1..1275: note = Encodes the peptide sequence at SEQ ID NO. 281
  source 1..1275: mol_type = unassigned DNA
atgggggagggcagagcaggagacggcctcatcaagctgttcggcaagaccatccccgtgccggagacgcccgccgcgggcgacgctgccaaggacatccaacaaagcggcagcagcggcacgactgatctgaaggggcaagagaacacccttcaggattccacaggctcgcctccgcagcaggaggttgcggacactgaagactcgtcggctgccaagaactcctcggcagacaaacagcagggcgaggcggccaaccagaaggagaagctcaagaagcctgacaagatcctgccttgcccccggtgcaacagcatggacaccaagttctgctactataacaactacaacatcaaccagccacgccacttctgcaagaactgccagaggtactggactgctggcggtgccatgcgcaacgtccctgtgggtgcaggccggcgcaagagcaagagcgcgtcagctgcttcccacttccttcagagggtcagggccgctttgcccatggatcccctctgcactgcagccaagacgaatggcacggtgctcagcttcggctcagacatgtccagcttagacctcacagagcagatgaagcacctgaaggagaagctcatcccaatagcggggatcaagaacggcgatgaacgttcagttggctcttgcactgaaggacctgcgaaggcagaagactcaaaccaaaaggagaatgttacagcagagaaatctgcaaaacttgttcagcatccatgcatgaacggggtggccatgtggccatttagctgtgcaccaccacctgcctgttacaccccaggcagcatagcaattccgttctacccagcacctgctgcctactggggctgcatggttccaggagcttggaatgccccatggccgcctcagtccccgtccgagacaggttcgacccttagcactgcttcaccagcatccacgaagtccaattgcttcacaccaggaaagcgccctagagactgcaacgaggaaggagataccaaaggaaatggcaaggtgtgggtgccaaagacgatccgaatcgatgacgtggatgaggtggctaggagttctatcttgtcgctaatcgggatcaatggcgacaaggcaggcaaagatggcaaagggtgcaagcttgcaagggtttttgagcagaaagaagaggcaaggacggcaactcactcagtcatcaatggcttgccattcttgcaggggaacccagctgcgctctcacggtcattgaccttccaggagggatcttga

SEQ ID NO: 281 - protein, 424 aa, Sorghum bicolor
  REGION 93..155: note = Pfam Name: zf-Dof Pfam Description: Dof domain, zinc finger
  REGION 1..424: note = Ceres Annot ID no. 8642924
  REGION 1..424: note = Bit score of 807.1 for HMM based on sequences of Figure 2
  REGION 1..424: note = Functional Homolog Of SEQ ID NO. 263
MGEGRAGDGLIKLFGKTIPVPETPAAGDAAKDIQQSGSSGTTDLKGQENTLQDSTGSPPQQEVADTEDSSAAKNSSADKQQGEAANQKEKLKKPDKILPCPRCNSMDTKFCYYNNYNINQPRHFCKNCQRYWTAGGAMRNVPVGAGRRKSKSASAASHFLQRVRAALPMDPLCTAAKTNGTVLSFGSDMSSLDLTEQMKHLKEKLIPIAGIKNGDERSVGSCTEGPAKAEDSNQKENVTAEKSAKLVQHPCMNGVAMWPFSCAPPPACYTPGSIAIPFYPAPAAYWGCMVPGAWNAPWPPQSPSETGSTLSTASPASTKSNCFTPGKRPRDCNEEGDTKGNGKVWVPKTIRIDDVDEVARSSILSLIGINGDKAGKDGKGCKLARVFEQKEEARTATHSVINGLPFLQGNPAALSRSLTFQEGS

SEQ ID NO: 282 - protein, 440 aa, Oryza sativa
  REGION 101..163: note = Pfam Name: zf-Dof Pfam Description: Dof domain, zinc finger
  REGION 1..440: note = Public GI ID no. 115451001
  REGION 1..440: note = Bit score of 740.4 for HMM based on sequences of Figure 2
  REGION 1..440: note = Functional Homolog Of SEQ ID NO. 263
  source 1..440: note = Oryza sativa subsp. japonica
MGECKVGGGGGGGDCLIKLFGKTIPVPEPGACAAGDVDKDLQHSGSSTTEPKTQENTVQDSTSPPPQPEVVDTEDSSADKNSSENQQQQGDTANQKEKLKKPDKILPCPRCSSMDTKFCYYNNYNINQPRHFCKNCQRYWTAGGAMRNVPVGAGRRKSKSVSAASHFLQRVRAALPGDPPLYAPVKTNGTVLSFGSDLSTLDLTEQMKHLKDKFIPTTGIKNTDEMPVGLCAEGLSKTEESNQTNLKEKVSADRSPNVAQHPCMNGGAMWPFGVAPPPAYYTSSIAIPFYPAAAAAVAAYWGCMVPGAWNAPWPPQSQSQSVSSSSAASPVSTMTNCFRLGKHPRDGDEELDSKGNGKVWVPKTVRIDDVDEVARSSIWSLIGIKGDKVGADHGRGCKLAKVFESKDEAKASTHTAISSLPFMQGNPAALTRSVTFQEGS

SEQ ID NO: 283 - protein, 366 aa, Arabidopsis thaliana
  REGION 100..162: note = Pfam Name: zf-Dof Pfam Description: Dof domain, zinc finger
  REGION 1..366: note = Bit score of 712.8 for HMM based on sequences of Figure 2
  REGION 1..366: note = Functional Homolog Of SEQ ID NO. 263
MSQVRDTPVKLFGWTITPVSHDPYSSSSHVLPDSSSSSSSSSLSLRPHMMNNQSVTDNTSLKLSSNLNNESKETSENSDDQHSEITTITSEEEKTTELKKPDKILPCPRCNSADTKFCYYNNYNVNQPRHFCRKCQRYWTAGGSMRIVPVGSGRRKNKGWVSSDQYLHITSEDTDNYNSSSTKILSFESSDSLVTERPKHQSNEVKINAEPVSQEPNNFQGLLPPQASPVSPPWPYQYPPNPSFYHMPVYWGCAIPVWSTLDTSTCLGKRTRDETSHETVKESKNAFERTSLLLESQSIKNETSMATNNHVWYPVPMTREKTQEFSFFSNGAETKSSNNRFVPETYLNLQANPAAMARSMNFRESI

SEQ ID NO: 284 - DNA, 1965 bp, Zea mays
  misc_feature 1..1965: note = Ceres Clone ID no. 1573856
  misc_feature 1..1965: note = Encodes the peptide sequence at SEQ ID NO. 285
  source 1..1965: mol_type = unassigned DNA
gagcagatatcatccgttcgtttgtttgcccttttttgccggcctcctcgtctcttccggttccggctacaagtgaagtgagctcggccgtctgttgcctagcgtgctgcttcgttcgtcgttggcttgcagcagcttgccgaagagaagaaagcagcaggccgggagctttctgtttgtttggatccgagtgagaagaagatggtggccgagtgccacggaggaggagcagcagcagcaggaggggacttcctcatcaagctcttcgggatgaccatccccgtgccggagtgcggcgacgccaaggatattcagcagagcaagagcaacaggtggaccgagcaggatcaggattcccatggcctggagaccgcgcccgcgcccgcgcacacggacacggacacggacacctccgacccgtccccgcagccggaggtcgtggacgccgaggaccccacggagacgcaacagaggcccggcaacggcgacggcgagggcgatgctgccggccagagggagaagctgaagaagcccgacaaggtgctgccgtgcccgcgctgcaacagcatggacaccaagttctgctacttcaacaactacaacgtcaaccagccgcgccacttctgcaagaactgccagcggtactggacggccggcggcgccatgcgcaacgtgcccgtgggggccggccgccgcaagaacaagaacgccgccgcctcgcacttcttccagagggtccgggcgaccaacgccacggtgctcagcttcgggggccatggtggcgcgcctcctgctgcccgcttggacctggacctcgccgagcagctgagccaccagctggccccggtcaggagcgccggcgacgcgggccgcccttgcagcgaaggatcgagcagcagggacggcaacggcagcaggtcttctgtagacgaagctgcagcaaacgcagacgacgggtcagtgcagcagcacccaggcccagcaagcatgaacagcagcggggcaaccgtgtggccgccgtacagctgcgccccagctccggcggcgtacttcccccagggcatcgcgattccgatctacccggccgcaccggcctactggggctgcatggttcccggagcttggagcctgccatggccggtgcagcacccgtcgtcgtcgtcgtcgccgtcgcccaccaccaccagtgctccttcagtcgtctcgtcatccggggcagctgacgactcatcatcccacgcgctgggcaagcgcccccgggaccgggagggtgacgacgggagaaacggcggcaacgccaaggtgtgggcgcccaagagcatccggatagacgacgtggacgaggtggccaggagctcaatctggtccctcgtcgggatcaaaggcgaccagacgaagcagcaggacgcagcagacgaccacgccggtgggcacagcaagcagctcgggacggtgttcgagcccaagcgcggcgaggccaccaagaaggctatgatgacaagctcgccgctccttcacgcgaaccccgttgcgctcacgcgctccgtggccttccaggaggggtcttgattcttcttcaaggacatccatcagcagcagcaggaatttcctcatgcaacgttccttctcatctgaacttctgaactgaacatgagctgatcagcctgacagtacgtactgaattttgtttttgtataaatcatcataggattgtaatatctatctatatgcttagtgggaaacttagctagcgtatgtgtaagtggacttgtaatataggcggcacgcaggatgtacatagaattaattagctatatgggtttgagaaagaccaggagatcaataagaggtccctgggtgtagataaataacattaggggaaggaatgtattgcttcaggtatttcactcttcagcaacttgttgtcaaagtccattctataacaaagtattctattttttgttc

SEQ ID NO: 285 - protein, 455 aa, Zea mays
  REGION 110..172: note = Pfam Name: zf-Dof Pfam Description: Dof domain, zinc finger
  REGION 1..455: note = Ceres Clone ID no. 1573856
  REGION 1..455: note = Bit score of 673.2 for HMM based on sequences of Figure 2
  REGION 1..455: note = Functional Homolog Of SEQ ID NO. 263
MVAECHGGGAAAAGGDFLIKLFGMTIPVPECGDAKDIQQSKSNRWTEQDQDSHGLETAPAPAHTDTDTDTSDPSPQPEVVDAEDPTETQQRPGNGDGEGDAAGQREKLKKPDKVLPCPRCNSMDTKFCYFNNYNVNQPRHFCKNCQRYWTAGGAMRNVPVGAGRRKNKNAAASHFFQRVRATNATVLSFGGHGGAPPAARLDLDLAEQLSHQLAPVRSAGDAGRPCSEGSSSRDGNGSRSSVDEAAANADDGSVQQHPGPASMNSSGATVWPPYSCAPAPAAYFPQGIAIPIYPAAPAYWGCMVPGAWSLPWPVQHPSSSSSPSPTTTSAPSVVSSSGAADDSSSHALGKRPRDREGDDGRNGGNAKVWAPKSIRIDDVDEVARSSIWSLVGIKGDQTKQQDAADDHAGGHSKQLGTVFEPKRGEATKKAMMTSSPLLHANPVALTRSVAFQEGS

SEQ ID NO: 286 - DNA, 1521 bp, Populus balsamifera
  misc_feature 1..1521: note = Ceres Annot ID no. 1476818
  misc_feature 1..1521: note = Encodes the peptide sequence at SEQ ID NO. 287
  source 1..1521: mol_type = unassigned DNA; note = Populus balsamifera subsp. trichocarpa
atgtcggagccaaaagaccaggcatttaagctgttcgggaagactattcaagtgccagagatctctgttactactgctaccaccacagatgatgatgatgacgacgatagtcaagatcaagaccgtccttcttgtgcaaactcttctcttgatgagaccaatattactgacgattataataacaatgataaaagagatcatggagaagaagatacagaaactgatgataaggattcggtgggtaaaacaacaattgagaaccaggaagatggagcttcacctgtagctgccaaagagtcttcaaatctagatgcaacttcagggacaagtgaaaaccctaaaacaccttccgttgagaaagagagcacggcgttgaaaacttcaaacactgaagaagaacagagtgatacaagtaattcacaagagaaaaccctgaagaaaccagacaagatcattccatgcccccgctgtaatagcatggacacaaagttttgttactacaacaattacaacgtgaaccaaccccgacacttctgcaagaattgtcagagatattggacagctggcggtaccatgaggaatgtgcctgtgggtgctggtcgtcgcaaaaacaagaactcagcttctcattaccgtcacataaccattcctgaagctcttcagaatggtcgagctgatgttccaaatggagtccaccatccttcactgaaaactaatggaacagtgctaacctttggttctgatgcacctcttcatgaatcaatggcttcggtattgaatcttgctgataaaacaatgcggaactgcacaatgaatgggtttcataaacctgaagcattaagggtcccagtttcttatggaggtggtgaaaacggtgatgaccattctaatggatcttctgtcactgtgtcaaattcaagcgatgaagctggcaaaagtgtgtcaaaagaatcagctatgcagaattatcagggctacccccctcagataccatgttttcctggagttccctggccttacccttggaattcagctcaatggagctccccagtacccccacctgccttttgcccttccagttttcctatgccattctatcctgcagcagcttattggggttgtactgtaccaggtgcttggaatgtcccttggcttcctcaaccatcttctccaaaacaaacctcctcgagctctgaccctaactctccaaccctagggaaacattcaagagatgaaaacttgctcaaacctagcaactccaaagaagagctggtgaacactgaaagatgcctttggattccgaaaacgctgaggattgatgacccaggagaagccgcaaaaagctctatatggacaacacttgggattaagaatgataagcctggctcatttggtggccgaggactctttaaggcctttgattcaaaggttgagaagaatcgcgcagccgaaacctctccagtcttgcacgctaatcctgcagcattgtctagatctctcaaatttcaggagagctcataa

SEQ ID NO: 287 - protein, 506 aa, Populus balsamifera
  REGION 147..209: note = Pfam Name: zf-Dof Pfam Description: Dof domain, zinc finger
  REGION 1..506: note = Ceres Annot ID no. 1476818
  REGION 1..506: note = Bit score of 666.9 for HMM based on sequences of Figure 2
  REGION 1..506: note = Functional Homolog Of SEQ ID NO. 263
  source 1..506: note = Populus balsamifera subsp. trichocarpa
MSEPKDQAFKLFGKTIQVPEISVTTATTTDDDDDDDSQDQDRPSCANSSLDETNITDDYNNNDKRDHGEEDTETDDKDSVGKTTIENQEDGASPVAAKESSNLDATSGTSENPKTPSVEKESTALKTSNTEEEQSDTSNSQEKTLKKPDKIIPCPRCNSMDTKFCYYNNYNVNQPRHFCKNCQRYWTAGGTMRNVPVGAGRRKNKNSASHYRHITIPEALQNGRADVPNGVHHPSLKTNGTVLTFGSDAPLHESMASVLNLADKTMRNCTMNGFHKPEALRVPVSYGGGENGDDHSNGSSVTVSNSSDEAGKSVSKESAMQNYQGYPPQIPCFPGVPWPYPWNSAQWSSPVPPPAFCPSSFPMPFYPAAAYWGCTVPGAWNVPWLPQPSSPKQTSSSSDPNSPTLGKHSRDENLLKPSNSKEELVNTERCLWIPKTLRIDDPGEAAKSSIWTTLGIKNDKPGSFGGRGLFKAFDSKVEKNRAAETSPVLHANPAALSRSLKFQESS

SEQ ID NO: 288 - DNA, 1512 bp, Populus balsamifera
  misc_feature 1..1512: note = Ceres Annot ID no. 1450024
  misc_feature 1..1512: note = Encodes the peptide sequence at SEQ ID NO. 289
  source 1..1512: mol_type = unassigned DNA; note = Populus balsamifera subsp. trichocarpa
atgttggagccaaaagacccggctattaagctgtttgggaagactattcaagtgacagagatctcttctactaccactacagataatgatgatagtcaagatcaagaccgtccatcttgtgcaagctcttctctttatgacgccgattctgataataataagagatatcatggagaagaagatatagaagctgatgataaggactcggtggaaaaaagcctgactgagaaacaggaagatggagtttcacccgtggctactgaagagccttcaaatccagatgcaacctcagggacaagtgaaaaccctaaaacaccttccattgagaaggagagtgaaggattgcaaacttcaaggacagaagaagaagatagtgatacaagtaattcgccagaaaagaccctgaaaaaacctgataagatccttccatgcccccgctgtaatagcatggacaccaagttctgttactacaacaattacaacgtgaaccaaccccgacacttctgcaagaattgtcagagatattggacagctgggggaaccatgaggaatgtgcctgtgggtgctggtcgtcgcaaaaacaagaactcagcttctcattatcgtcacataaccattcctgaagctcttcagaatgttcgagctgatgttccaaatggagtctaccatccttcaatgaaaactaatggaacagtgctaacctttggctctgacacacctcttcatgaatcaatggcttctgtattgaaccttgcagataaaacaacgcggaattgcacaagaaacgggtctcataaacctgatgcagtgaggattccagtttcttatggaagtggagaaaacggtgatgaccattctaatggatcttcagtcacagtgtcaaattcaattgatgaggcaggcaaaagcatgtcgaaagaatcagctatgcagaattgtcagggctttccccctgagataccatgttttcctggagttccctggccttacccttggaattcagctcaatggagctccccattacccccacctgccttttgccctcccggttttcctatgccattctatcctgcagcagcatactggggttgcaccgtaccaggtgcttggaatatcccttggcttcctcagccatcttctcccaagcaaacctcctcgagctctggcccaaactctccaaccctagggaaacattcaagggatgaaaacatgctcaaatctagcaactctgaagaaggggagtcggcaaaagaaaataacactgaaagatgcctttggatcccaaaaacgctcaggattgttgacccaggtgaagctgcaaaaagctctatatggacgactctggggattaagaatgataagcctgacttgattggtgggcgaggactgtttaaggcgtttgattcaaaggtcgaaaagaatcatgaagccgaaacctctccagtcttacaagctaatcctgcagcattgtctagatcactcaaatttcaggagagctcgtattttgggtag

SEQ ID NO: 289 - protein, 503 aa, Populus balsamifera
  REGION 137..199: note = Pfam Name: zf-Dof Pfam Description: Dof domain, zinc finger
  REGION 1..503: note = Ceres Annot ID no. 1450024
  REGION 1..503: note = Bit score of 646.8 for HMM based on sequences of Figure 2
  REGION 1..503: note = Functional Homolog Of SEQ ID NO. 263
  source 1..503: note = Populus balsamifera subsp. trichocarpa
MLEPKDPAIKLFGKTIQVTEISSTTTTDNDDSQDQDRPSCASSSLYDADSDNNKRYHGEEDIEADDKDSVEKSLTEKQEDGVSPVATEEPSNPDATSGTSENPKTPSIEKESEGLQTSRTEEEDSDTSNSPEKTLKKPDKILPCPRCNSMDTKFCYYNNYNVNQPRHFCKNCQRYWTAGGTMRNVPVGAGRRKNKNSASHYRHITIPEALQNVRADVPNGVYHPSMKTNGTVLTFGSDTPLHESMASVLNLADKTTRNCTRNGSHKPDAVRIPVSYGSGENGDDHSNGSSVTVSNSIDEAGKSMSKESAMQNCQGFPPEIPCFPGVPWPYPWNSAQWSSPLPPPAFCPPGFPMPFYPAAAYWGCTVPGAWNIPWLPQPSSPKQTSSSSGPNSPTLGKHSRDENMLKSSNSEEGESAKENNTERCLWIPKTLRIVDPGEAAKSSIWTTLGIKNDKPDLIGGRGLFKAFDSKVEKNHEAETSPVLQANPAALSRSLKFQESSYFG

SEQ ID NO: 290 - DNA, 1362 bp, Populus balsamifera
  misc_feature 1..1362: note = Ceres Annot ID no. 1503065
  misc_feature 1..1362: note = Encodes the peptide sequence at SEQ ID NO. 291
  source 1..1362: mol_type = unassigned DNA; note = Populus balsamifera subsp. trichocarpa
atgttggagccaaaagacccggctattaagctgtttgggaagactattcaagactcggtggaaaaaagcctgactgagaaacaggaagatggagtttcacccgtggctactgaagagccttcaaatccagatgcaacctcagggacaagtgaaaaccctaaaacaccttccattgagaaggagagtgaaggattgcaaacttcaaggacagaagaagaagatagtgatacaagtaattcgccagaaaagaccctgaaaaaacctgataagatccttccatgcccccgctgtaatagcatggacaccaagttctgttactacaacaattacaacgtgaaccaaccccgacacttctgcaagaattgtcagagatattggacagctgggggaaccatgaggaatgtgcctgtgggtgctggtcgtcgcaaaaacaagaactcagcttctcattatcgtcacataaccattcctgaagctcttcagaatgttcgagctgatgttccaaatggagtctaccatccttcaatgaaaactaatggaacagtgctaacctttggctctgacacacctcttcatgaatcaatggcttctgtattgaaccttgcagataaaacaacgcggaattgcacaagaaacgggtctcataaacctgatgcagtgaggattccagtttcttatggaagtggagaaaacggtgatgaccattctaatggatcttcagtcacagtgtcaaattcaattgatgaggcaggcaaaagcatgtcgaaagaatcagctatgcagaattgtcagggctttccccctgagataccatgttttcctggagttccctggccttacccttggaattcagctcaatggagctccccattacccccacctgccttttgccctcccggttttcctatgccattctatcctgcagcagcatactggggttgcaccgtaccaggtgcttggaatatcccttggcttcctcagccatcttctcccaagcaaacctcctcgagctctggcccaaactctccaaccctagggaaacattcaagggatgaaaacatgctcaaatctagcaactctgaagaaggggagtcggcaaaagaaaataacactgaaagatgcctttggatcccaaaaacgctcaggattgttgacccaggtgaagctgcaaaaagctctatatggacgactctggggattaagaatgataagcctgacttgattggtgggcgaggactgtttaaggcgtttgattcaaaggtcgaaaagaatcatgaagccgaaacctctccagtcttacaagctaatcctgcagcattgtctagatcactcaaatttcaggagagctcgtattttgggtag

SEQ ID NO: 291 - protein, 453 aa, Populus balsamifera
  REGION 87..149: note = Pfam Name: zf-Dof Pfam Description: Dof domain, zinc finger
  REGION 1..453: note = Ceres Annot ID no. 1503065
  REGION 1..453: note = Bit score of 644.5 for HMM based on sequences of Figure 2
  REGION 1..453: note = Functional Homolog Of SEQ ID NO. 263
  source 1..453: note = Populus balsamifera subsp. trichocarpa
MLEPKDPAIKLFGKTIQDSVEKSLTEKQEDGVSPVATEEPSNPDATSGTSENPKTPSIEKESEGLQTSRTEEEDSDTSNSPEKTLKKPDKILPCPRCNSMDTKFCYYNNYNVNQPRHFCKNCQRYWTAGGTMRNVPVGAGRRKNKNSASHYRHITIPEALQNVRADVPNGVYHPSMKTNGTVLTFGSDTPLHESMASVLNLADKTTRNCTRNGSHKPDAVRIPVSYGSGENGDDHSNGSSVTVSNSIDEAGKSMSKESAMQNCQGFPPEIPCFPGVPWPYPWNSAQWSSPLPPPAFCPPGFPMPFYPAAAYWGCTVPGAWNIPWLPQPSSPKQTSSSSGPNSPTLGKHSRDENMLKSSNSEEGESAKENNTERCLWIPKTLRIVDPGEAAKSSIWTTLGIKNDKPDLIGGRGLFKAFDSKVEKNHEAETSPVLQANPAALSRSLKFQESSYFG

SEQ ID NO: 292 - protein, 473 aa, Vitis vinifera
  REGION 116..178: note = Pfam Name: zf-Dof Pfam Description: Dof domain, zinc finger
  REGION 1..473: note = Public GI ID no. 147866358
  REGION 1..473: note = Bit score of 590.0 for HMM based on sequences of Figure 2
  REGION 1..473: note = Functional Homolog Of SEQ ID NO. 263
  UNSURE 423: note = X is any aa, unknown, or other
MQEPKDPAFKLFGKTIPMLADGDAPVSSGDVGDSGAAVAREDGLEEETEKDALGGKPAETKGEDGSEESRNSETVAESNENPKTPSIAEENVTLKTSKAEKGQSDSPDSQEKTLKKPDKILPCPRCNSMDTKFCYYNNYNINQPRHFCKSCQRYWTAGGTMRNVPVGAGRRKNKNSASHYRHITISEALQTVQIEATNGVHQPTLKSNGTVLTFGSDAPFCDSMTSVLNLEEKKMPNGARNGFHTHKEQGIPVSFRVQENGDDHSSASSITVSNSSEEGSKYGLHEAKRNSHGVPSRIPCIPGIPWPYPWNSAVPPPFCPPGFPMPFYPAAYWNCHVTAPWNIPWLSPPSSSANQKTPNSRQNSPTLGKHSREGDILKPSIVEDEETPKQRSSERCLWVPKTLRIDDPAEAAKSSIWTTLGIXNDKVDSVSGGGLFNAFHLKGDDKNHAMDTSAVLRANPAALSRSLNFQESS

SEQ ID NO: 293 - DNA, 2046 bp, Zea mays
  misc_feature 1..2046: note = Ceres Clone ID no. 230073
  misc_feature 1..2046: note = Encodes the peptide sequence at SEQ ID NO. 294
  source 1..2046: mol_type = unassigned DNA
gcgtcgccaactccacttgtcagatcttgcccgtatggtatggagctcgccggagcagcctcccctcacccgccgccggaatcccacgtggcgccgccccgcccacctccgcagccgccggaagaggatttatgtgaagatagaggggacatgagagtcaccggcgaaaagccatgcacacatcgggaatcagatgttggtcagacaaatagttgtagccttaacaattccagtgagtgtgagaatcatacacccagcaacgacgaaatatcggaaccagagtccaatttggagatggccaagactgatcagggcggcgatgtgccgagcggagagaaggtcctgaagaagccagacaagatcctgccgtgccctcgctgcaacagcatggacacgaagttctgctactacaacaactacaacatcaagcagccaaggcatttctgcaagagctgtcagaggtactggaccgcaggcggaagcatgagaaacatccccgttggtgctgggaggcgcaagagcaagagctccagcgcgagttgccgcagcgtgttgattcccgttccaggcagcagtagtgtagctaatcctggcggagaggcttccctgtttccgttgtccgtaaaagcaaaccaagcagcagttagcttcgggcctgattcccccctctgcacctccatggcctccgtgctgaagatcggaggaggaggagagcaggttaagagctgcagccctgcctcagcagcagcacagcccaggaacggagaaacccagacccagacgtgcgcaccttcttctgctgctacaacaccatcagatggtccagggaatggattgcagaaaggagcagagagcgcacaccaaaaccaaaaccaaaaccaaaacggaatcattgggcacagcaacggagtcactccagtgcatcctataccgttcttccccggaccgcctttcgtgtacccctggagtccagcatggaacggcattcccgccatggcagcggcggtgtgcgcagccccagcgacagccgaagcagcgatttcatcagaacacggcaccgcgagcagcaccgtccagtggaacgtgccaccagcgatcgtgcccgtgctgccaccgggattctgcggcccgatcccagtcccggtaatcccgccgccttccgtctggccactgatcactccctggcccaacgcagcatggagcgcgccgtggctcgggcctagcgctagcgtgccgccggggtcatctcggagcagcggcagcagcacgtgctccgacagcggctgcggctccggctcccccgtcctgggaaagcactcgagggagtcgaggccgcagggcgacgagaaggcggaacgacggtgcctgtggatccccaagacgctccggatcgacgaccctgtcgaggccgccaagagctcgatctggacgacgctcgggatcgagcctggcgaccggggcatgttcaggccgttccagtcgaagcatggacggcagcaggagctgcaagcgtccggcgccgctcgcgccctgcaggccaacccggcggctctgtcgcgctcgcagtcttttcaggagacgacgtgattactacactacagaccagagcgttgctgaaacctgtgtggcattactattcagagacgattgtatttcaacttcaaggggggaaatgagagagagagcgcgagagagagattggcctgtttggttcactacctcagttgccacactttgcctaacttttctgactaaggttagttattcaattcgaacgactaacattaggcaaagtgtggcatatttagtcataaaccaaacatgccatatatgttctgtacaatatgattggcaacataggtgctgctgctgtacaaggcagcggacaccgttactgtaactgtaaccattggaagagtgcatcctcaaacagtgtgttgtttccatgtagagcgtgcccccaacatgttgggttggaggtgatcaggtttccagcgcgtgcgtgcttggttgtacaagaataactgtcaatagcttcccttcgcc

SEQ ID NO: 294 - protein, 515 aa, Zea mays
  REGION 104..166: note = Pfam Name: zf-Dof Pfam Description: Dof domain, zinc finger
  REGION 1..515: note = Ceres Clone ID no. 230073
  REGION 1..515: note = Bit score of 577.1 for HMM based on sequences of Figure 2
  REGION 1..515: note = Functional Homolog Of SEQ ID NO. 263
MELAGAASPHPPPESHVAPPRPPPQPPEEDLCEDRGDMRVTGEKPCTHRESDVGQTNSCSLNNSSECENHTPSNDEISEPESNLEMAKTDQGGDVPSGEKVLKKPDKILPCPRCNSMDTKFCYYNNYNIKQPRHFCKSCQRYWTAGGSMRNIPVGAGRRKSKSSSASCRSVLIPVPGSSSVANPGGEASLFPLSVKANQAAVSFGPDSPLCTSMASVLKIGGGGEQVKSCSPASAAAQPRNGETQTQTCAPSSAATTPSDGPGNGLQKGAESAHQNQNQNQNGIIGHSNGVTPVHPIPFFPGPPFVYPWSPAWNGIPAMAAAVCAAPATAEAAISSEHGTASSTVQWNVPPAIVPVLPPGFCGPIPVPVIPPPSVWPLITPWPNAAWSAPWLGPSASVPPGSSRSSGSSTCSDSGCGSGSPVLGKHSRESRPQGDEKAERRCLWIPKTLRIDDPVEAAKSSIWTTLGIEPGDRGMFRPFQSKHGRQQELQASGAARALQANPAALSRSQSFQETT

SEQ ID NO: 295 - protein, 317 aa, Arabidopsis thaliana
  REGION 51..113: note = Pfam Name: zf-Dof Pfam Description: Dof domain, zinc finger
  REGION 1..317: note = Bit score of 575.4 for HMM based on sequences of Figure 2
  REGION 1..317: note = Functional Homolog Of SEQ ID NO. 263
MNNQSVTDNTSLKLSSNLNNESKETSENSDDQHSEITTITSEEEKTTELKKPDKILPCPRCNSADTKFCYYNNYNVNQPRHFCRKCQRYWTAGGSMRIVPVGSGRRKNKGWVSSDQYLHITSEDTDNYNSSSTKILSFESSDSLVTERPKHQSNEVKINAEPVSQEPNNFQGLLPPQASPVSPPWPYQYPPNPSFYHMPVYWGCAIPVWSTLDTSTCLGKRTRDETSHETVKESKNAFERTSLLLESQSIKNETSMATNNHVWYPVPMTREKTQEFSFFSNGAETKSSNNRFVPETYLNLQANPAAMARSMNFRESI

SEQ ID NO: 296 - protein, 317 aa, Arabidopsis thaliana
  REGION 51..113: note = Pfam Name: zf-Dof Pfam Description: Dof domain, zinc finger
  REGION 1..317: note = Bit score of 572.5 for HMM based on sequences of Figure 2
  REGION 1..317: note = Functional Homolog Of SEQ ID NO. 263
MNNQSVTDNTSLKLSSNLNNESKETSENSDDQHSEITTITSEEEKTTELKKPDKILPCPRCNSADTKFCYYNNYNVNQPRHFCRKCQRYWTAGGSMRIVPVGSGRRKNKGWVSSDQYLHITSEDTDNYNSSSTKILSFESSDSLVTERPKHQSNEVKINAEPVSQEPNNFQGLLPPQASPVSPPWPYQYPPNPSFYHMPVYWGCAIPVWSTLDTSTCLGKRTRDETSHETVKESKNAFERTSMLLESQSIKNETSMATNNHVWYPVPMTREKTQEFSFFSNGAETKSSNNRFVPETYLNLQANPAAMARSMNFRESI

SEQ ID NO: 297 - protein, 437 aa, Oryza sativa
  REGION 90..152: note = Pfam Name: zf-Dof Pfam Description: Dof domain, zinc finger
  REGION 1..437: note = Public GI ID no. 78708599
  REGION 1..437: note = Bit score of 570.1 for HMM based on sequences of Figure 2
  REGION 1..437: note = Functional Homolog Of SEQ ID NO. 263
  source 1..437: note = Oryza sativa subsp. japonica
MGECRGGGGGGDGLIKLFGKTIPVQPDAKDVQQHSGSSSSSTESDVQETAAVAVADPSPRSEVVDGESPPQPGGEAASHQQQQKEMKLKKPDKILPCPRCSSMDTKFCYFNNYNVNQPRHFCKHCQRYWTAGGAMRNVPVGAGRRKNKNATAAAHFLHRVRACAAAAAMPAAPHDATNATVLSFGGGGGGHDAPPVTLDLADKMTRLGKEGLVAHARNADAAAACSEVSSNRDDEQIGNTVAKPANGLQQHPPPPHHHHHSAMNGGGIWPYYTSGIAIPIYPAAPAYWGCMIPPPGAWSLPWPATVQSQAISSSSPPTSATPSVSSFTLGKHPREGGDHEARDHHGNGKVWVPKTIRIDNADEVARSSIRSLFAFRGGDKADDNNDDDGTGVHKLATTVFEPKRDSKTAKHPAITSLPLLHTNPVALTRSATFQEGS

SEQ ID NO: 298 - protein, 486 aa, Oryza sativa
  REGION 139..201: note = Pfam Name: zf-Dof Pfam Description: Dof domain, zinc finger
  REGION 1..486: note = Public GI ID no. 15451553
  REGION 1..486: note = Bit score of 566.5 for HMM based on sequences of Figure 2
  REGION 1..486: note = Functional Homolog Of SEQ ID NO. 263
  source 1..486: note = Oryza sativa subsp. japonica
MGGGGKCKRGKRGKIAAKRRRGQCCSSSSSSGGARRRARERESEESLGEMGECRGGGGGGDGLIKLFGKTIPVQPDAKDVQQHSGSSSSSTESDVQETAAVAVADPSPRSEVVDGESPPQPGGEAASHQQQQKEMKLKKPDKILPCPRCSSMDTKFCYFNNYNVNQPRHFCKHCQRYWTAGGAMRNVPVGAGRRKNKNATAAAHFLHRVRACAAAAAMPAAPHDATNATVLSFGGGGGGHDAPPVTLDLADKMTRLGKEGLVAHARNADAAAACSEVSSNRDDEQIGNTVAKPANGLQQHPPPPHHHHHSAMNGGGIWPYYTSGIAIPIYPAAPAYWGCMIPPPGAWSLPWPATVQSQAISSSSPPTSATPSVSSFTLGKHPREGGDHEARDHHGNGKVWVPKTIRIDNADEVARSSIRSLFAFRGGDKADDNNDDDGTGVHKLATTVFEPKRDSKTAKHPAITSLPLLHTNPVALTRSATFQEGS

SEQ ID NO: 299 - protein, 338 aa, Oryza sativa
  REGION 101..163: note = Pfam Name: zf-Dof Pfam Description: Dof domain, zinc finger
  REGION 1..338: note = Public GI ID no. 125542572
  REGION 1..338: note = Bit score of 490.7 for HMM based on sequences of Figure 2
  REGION 1..338: note = Functional Homolog Of SEQ ID NO. 263
  source 1..338: note = Oryza sativa subsp. indica
MGECKVGGGGGGGDCLIKLFGKTIPVPEPGACAAGDVDKDLQHSGSSTTEPKTQENTVQDSTSPPPQPEVVDTEDSSADKNSSENQQQQGDTANQKEKLKKPDKILPCPRCSSMDTKFCYYNNYNINQPRHFCKNCQRYWTAGGAMRNVPVGAGRRKSKSVSAASHFLQRVRAALPGDPPLYAPVKTNGTVLSFGSDLSTLDLTEQMKHLKDKFIPTTGIKNTDEMPVVSTMTNCFRLGKHPRDGDEELDSKGNGKVWVPKTVRIDDVDEVARSSIWSLIGIKGDKVGADHGRGCKLAKVFESKDEAKTSTHTAISSLPFMQGNPAALTRSVTFQEGS

SEQ ID NO: 300 - protein, 367 aa, Vitis vinifera
  REGION 109..171: note = Pfam Name: zf-Dof Pfam Description: Dof domain, zinc finger
  REGION 1..367: note = Public GI ID no. 157342426
  REGION 1..367: note = Bit score of 441.6 for HMM based on sequences of Figure 2
  REGION 1..367: note = Functional Homolog Of SEQ ID NO. 263
MQEPKDPAFKLFGKTIPMLADGDAPVSSGDVGDSGAAVAREDGLEEETEKDALGGKPAETKGEDGSEESRNSETVAESNENPKTPSIAEENAEKGQSDSPDSQEKTLKKPDKILPCPRCNSMDTKFCYYNNYNINQPRHFCKSCQRYWTAGGTMRNVPVGAGRRKNKNSASHYRHITISEALQTVRIEATNGVHQPTLKSNGTVLTFGSDAPFCDSMTSAKRNSHGVPSRIPCIPGIPWPYPWNSAVPPPFCPPGFPMPFYPAAYWNWDILKPSIVEDEETPKQRSSERCLWVPKTLRIDDPAEAAKSSIWTTLGIKNDKVDSVSGGGLFNAFHLKGDDKNHAIDTSAVLRANPAALSRSLNFQESS

SEQ ID NO: 301 - DNA, 1802 bp, Arabidopsis thaliana
  misc_feature 1..1802: note = Ceres Annot ID no. 538622
  misc_feature 1..1802: note = Encodes the peptide sequence at SEQ ID NO. 302
  source 1..1802: mol_type = unassigned DNA
aaagacaaaaaagcattcccaattaacaaatctagaaatcaaaactcagacaaccaccgataacaagacagtcgtttctctctctcttttaaacaaataaaaattggaacttttttcctctgtcttctcaaaaagtttccgctttttgctcgctggagaagaaagaaagaaagaagtgaaaaggaatcattaccatggctgatccggcgattaagctctttggaaagacgattcctttacctgagcttggtgttgttgattcttcttctagctataccggatttttaaccgaaactcagattcctgttcggttatcagattcgtgtaccggcgatgatgatgatgaagagatgggtgattccggtttaggacgagaagaaggtgatgatgttggtgatggtggaggagagagcgagactgataaaaaggaagaaaaagatagtgagtgtcaggaagagtcattgaggaatgaatctaatgatgttactactactacatcgggtataactgaaaaaacggaaacaacaaaagctgcaaagacgaatgaagagtcaggtggtactgcttgctctcaagaggggaagttaaagaaacctgataagattctaccgtgtccgcgatgtaacagcatggaaaccaagttctgttactacaacaactataatgttaaccaacctcgccatttctgcaagaaatgtcagagatattggacagctggtggaacgatgaggaatgttccggttggtgctgggagacgtaagaataagagtccagcttctcattataaccgtcatgtaagtataacatctgcggaagctatgcagaaggtggcgagaactgatcttcaacatcctaatggtgcaaatcttctcacttttggctctgattctgtgctttgtgaatctatggcttctggattgaatcttgttgagaagtcattgttgaagacacaaactgtattgcaagaacccaatgaaggcttgaagattacggttccgttaaaccagacaaacgaagaagctggaacagtcagcccgttaccaaaagttccatgctttccaggaccaccaccaacttggccttacgcttggaacggagtttcgtggacgattttaccgttttaccctccaccggcttactggagctgcccgggggtttcaccgggggcatggaacagcttcacatggatgccacaacccaattcaccatctggttccaatccaaattctcctacactaggtaaacattcacgtgacgagaacgctgctgaaccaggaaccgcttttgatgaaaccgagtcacttggtagggagaaaagcaaacccgagagatgcttgtgggttcccaagacgctgaggattgatgatccagaggaagctgctaaaagttccatctgggaaacattagggatcaaaaaagacgaaaatgcggatactttcggagctttcagatcatcaaccaaagaaaaaagcagtctttctgaaggaagacttccgggaagaagaccggagttgcaagcgaatcctgctgctctttctaggtcagcaaacttccatgagagctcatagaaagaagaagaatctaagcagctgatttgattgtttttgggttcagtcttgtgttccaagaaagcaggtgagtccttttgtacatatagctatatatacacacacatgtttgtgtatatatatataatggttgacatagtgagggataagtagtttttggattgcagagtgaaagtttgttgtatcataaatgaaaaaacctcaaaactgtagttaaataaatgtatcttgcat

SEQ ID NO: 302 - protein, 457 aa, Arabidopsis thaliana
  REGION 133..195: note = Pfam Name: zf-Dof Pfam Description: Dof domain, zinc finger
  REGION 1..457: note = Ceres Annot ID no. 538622
  REGION 1..457: note = Bit score of 432.8 for HMM based on sequences of Figure 2
  REGION 1..457: note = Functional Homolog Of SEQ ID NO. 263
MADPAIKLFGKTIPLPELGVVDSSSSYTGFLTETQIPVRLSDSCTGDDDDEEMGDSGLGREEGDDVGDGGGESETDKKEEKDSECQEESLRNESNDVTTTTSGITEKTETTKAAKTNEESGGTACSQEGKLKKPDKILPCPRCNSMETKFCYYNNYNVNQPRHFCKKCQRYWTAGGTMRNVPVGAGRRKNKSPASHYNRHVSITSAEAMQKVARTDLQHPNGANLLTFGSDSVLCESMASGLNLVEKSLLKTQTVLQEPNEGLKITVPLNQTNEEAGTVSPLPKVPCFPGPPPTWPYAWNGVSWTILPFYPPPAYWSCPGVSPGAWNSFTWMPQPNSPSGSNPNSPTLGKHSRDENAAEPGTAFDETESLGREKSKPERCLWVPKTLRIDDPEEAAKSSIWETLGIKKDENADTFGAFRSSTKEKSSLSEGRLPGRRPELQANPAALSRSANFHESS

SEQ ID NO: 303 - DNA, 1479 bp, Solanum lycopersicum
  misc_feature 1..1479: note = Ceres Annot ID no. 8460661
  misc_feature 1..1479: note = Encodes the peptide sequence at SEQ ID NO. 304
  source 1..1479: mol_type = unassigned DNA
atgacttgtgattcagagatcaagctgtttggcaagatactcccggtggtcgtctccggcgttggtaggggtttgtctggtagtgatggtgttatatatgatggaaatagaaatgggtctgatcttgatcgatgtttagagggaagtaaagcaagcagtgtagagaaggatgaaggaagtgagtatgaaaagcaagaagctgaaaaggataatataactggagagctcagtgaagctaaatctgaggagggagaccaaaatcagatgatagaagaatcagaaaatcctaagactccatcagaatcagagagcagtcctaaatcttcaactgaggaagaccctcaagcagtaaaatcatccaagactgagaatgaaccgactaatgtgacaaattccgagcagaacaatctgaagaagccagacaaaatcctcccatgccctcgttgcaatagtttggatacaaaattctgttactataataacaacaatgtcaaccagcctcgtcatttctgcaggagctgccagaggtattggactgccggtggtaccatgaggaatctccctgtgggagctggtcgtcgcaagaacaagaatcttgcatctcaatatcgtaatataagtatccctgaaggattactagcagcaggaattgaatctccaaatgggttaattcatcatccattattcaaaccaaatggcactattctatcgtttggtcccgacttacccctgtgtgaacctatggcttctgcattaaatcaagcagagaaaagggtatcaactggtattcaaaacggttctcataaatcagaagtcaagaattcttcttgcaaaggtggagattctggggatgagtgctgtagagggattaacatcccgactccaaatatgatggtggaagaaggtaaaggagagccccacaaggctgttatgcatagtataaatggcatcccgtctcctgttccgtgcctccatggagtaccttggccttttccatggaatgctgcagttcctgtgtcggctatttgccccattcccttccctatgccattcttccctacaccttattggaattgcagtgtgcctccttggagtaatccttggttgagtccacctctgcgagctgcaaacgagaaaacatcaggttctgatcctacttcttctttagggaaacattcaagagagggggatttgcttaagccaagcaatcctgggggcaaagaacaatcagaacaaaagtattcagaggggtctattttggtcccaaaaacattgcggattgatgatcctgatgaagctgctaagagttctatatggtcaacacttgggattaaatatgattctactaacaggggagagtttttcaaggccttgcaaccaaaaagcaatgacaagcacaacaaagccaatacatttccagtattgcatactaaccctgcagccttatctagatctatcaccttccaacaaggtgcctaa

SEQ ID NO: 304 - protein, 492 aa, Solanum lycopersicum
  REGION 139..201: note = Pfam Name: zf-Dof Pfam Description: Dof domain, zinc finger
  REGION 1..492: note = Ceres Annot ID no. 8460661
  REGION 1..492: note = Bit score of 432.2 for HMM based on sequences of Figure 2
  REGION 1..492: note = Functional Homolog Of SEQ ID NO. 263
MTCDSEIKLFGKILPVVVSGVGRGLSGSDGVIYDGNRNGSDLDRCLEGSKASSVEKDEGSEYEKQEAEKDNITGELSEAKSEEGDQNQMIEESENPKTPSESESSPKSSTEEDPQAVKSSKTENEPTNVTNSEQNNLKKPDKILPCPRCNSLDTKFCYYNNNNVNQPRHFCRSCQRYWTAGGTMRNLPVGAGRRKNKNLASQYRNISIPEGLLAAGIESPNGLIHHPLFKPNGTILSFGPDLPLCEPMASALNQAEKRVSTGIQNGSHKSEVKNSSCKGGDSGDECCRGINIPTPNMMVEEGKGEPHKAVMHSINGIPSPVPCLHGVPWPFPWNAAVPVSAICPIPFPMPFFPTPYWNCSVPPWSNPWLSPPLRAANEKTSGSDPTSSLGKHSREGDLLKPSNPGGKEQSEQKYSEGSILVPKTLRIDDPDEAAKSSIWSTLGIKYDSTNRGEFFKALQPKSNDKHNKANTFPVLHTNPAALSRSITFQQGA

SEQ ID NO: 305 - protein, 457 aa, Arabidopsis thaliana
  REGION 133..195: note = Pfam Name: zf-Dof Pfam Description: Dof domain, zinc finger
  REGION 1..457: note = Public GI ID no. 15983797
  REGION 1..457: note = Bit score of 432.1 for HMM based on sequences of Figure 2
  REGION 1..457: note = Functional Homolog Of SEQ ID NO. 263
MADPAIKLFGKTIPLPELGVVDSSSSYTGFLTETQIPVRLSDSCTGDDDDEEMGDSGLGREEGDDVGDGGGESETDKKEEKDSECQEESLRNESNDVTTTTSGITEKTETTKAAKTNEESGGTACSQEGKLKKPDKILPCPRCNSMETKFCYYNNYNVNQPRHFCKKCQRYWTAGGTMRNVPVGAGRRKNKSPASHYNRHVSITSAEAMQKVARTDLQHPNGANLLTFGSDSVLCESMASGLNLVEKSLLKTQTVLQEPNEGLKITVPLNQTNEEARTVSPLPKVPCFPGPPPTWPYAWNGVSWTILPFYPPPAYWSCPGVSPGAWNSFTWMPQPNSPSGSNPNSPTLGKHSRDENAAEPGTAFDETESLGREKSKPERCLWVPKTLRIDDPEEAAKSSIWETLGIKKDENADTFGAFRSSTKEKSSLSEGRLPGRRPELQANPAALSRSANFHESS

SEQ ID NO: 306 - protein, 551 aa, Oryza sativa
  REGION 163..225: note = Pfam Name: zf-Dof Pfam Description: Dof domain, zinc finger
  REGION 1..551: note = Public GI ID no. 115435804
  REGION 1..551: note = Bit score of 428.4 for HMM based on sequences of Figure 2
  REGION 1..551: note = Functional Homolog Of SEQ ID NO. 263
  source 1..551: note = Oryza sativa subsp. japonica
MCDKDPGIKLFGRVIPLAPEAEAAAAADGSDQPEAAAAAAAEVEPAAQDEDHHKETEERKYDEMKVDVPQEEEDNEMKVDAPQEKKDNEVTADVPEEKGNDEMRVDASESIESIEPVSRSTLDNKKEDQGQMNNVEEKAASDSKDENEKTANDESGQDKVLKKPDKILPCPRCNSMDTKFCYYNNYNVNQPRHFCKNCQRYWTAGGTMRNVPVGAGRRKSKSSSLHYRHLLMAPDCMMGSRVEISKSMNPEAFASAHSTPIQPIGRNETVLKFGPEVPLCESMASVLNIQEQNGTNAAAVPTGENQEDNSCISSITSHNVLPENAAQVDKNSTPVYCNGVGPVPQYYLGAPYMYPWNIGWNNVPMMVPGTSMPESASQSESCSTSSAPWMNMNSPMMPVASRLSAPPFPYPLVPPALWGCLSSWPATAWNIPWIRTNGGCMSPSSSSNSSCSGNGSPLGKHSRDSSLPLKEDKEEKSLWVPKTLRIDDPDEAAKSSIWATLGIKPGDPGIFKPFQSKGESKGQAASETRPARALKANPAALSRSQSFQETS

SEQ ID NO: 307 - DNA, 2039 bp, Zea mays
  misc_feature 1..2039: note = Ceres Clone ID no. 1599579
  misc_feature 1..2039: note = Encodes the peptide sequence at SEQ ID NO. 308
  source 1..2039: mol_type = unassigned DNA
gttttcccccaattccgcaacaccccgctactatatccattactgcctcagcctgtctctctcctccagcttggttccttcctctcgccgcttcgagagcgcgtagtcagcagcggcttgcgttcctgtcggtctcgcaggcgggagcagagcaggacgaggatgtcggatcagaaggatcctgggatcaagctcttcggccgggtgatcccgtgggggcctgaaaccgccccgggaaccacggaagtggaggacccgccgcaggatgagctgcagccacgggcgccggaggttgccgcggcggtggatgaggatgaacacaatgagaaggaagagaaaaatgctaatgaagtggttgtcatgccacaagagaagggtaaagaaaccaaggttgacacgccacaagaggagaagggtaatgaaatggaggttgacgcgccacaaaaggaacatgacgacgaaatgaaaattgacgcacaacgagaggaaaaagacgaacaaacggatgccaacgcatcaccaacgcatggaaatatagaaccagccaatctacctccctcaggcctgatggacagtgccgaagataaagcagcatcagatgcaaagggggagaacgagaagacatcaaatgaggaatcaggccaggacaaggcacttaataagaagccagataagatcctaccttgccctcggtgcaacagcatggatacaaagttctgctattacaacaactacaacgtgaatcaaccaaggcacttctgcaagaactgccagcggtactggactgcagggggcaccatgaggaacgtacctgttggtgccgggcggcgcaagagtaagaacgcgtcattgcactaccgtcaattactgatggcccctgactgtatgctggggcctagagtggacatatcaaagccagtgctccctgaagctcttgcatcatctccacctgccccgacacagccagccagtagaaatggaacggtcctaaaatttgggcctgaggtaccattttgcgagtcaatggtgtcggcgctgaacattgatgagcagaacgtgaacagccctggaggaccaacagcaagaggtgaaaacagggaagataataataaccctggatccggcacaccaccatacaacggtgtgcctgaaaccatggcccccgtcgtcggcaagaacggggcaccagttcattgtaacggggttgccccagtgcctcagtattaccttggaacccctttcatgtacccttggagtgtaggatggagcaacgtgcctgtgatggtgccaggtaaaagcatgcccgaacctgctcctgctccagagagctgcagtactagctcagctgtatggatgaaccctcccatgatgccgggctcaagacctcctagcccagcgtttccataccctctcgtgccacccgggctctggggctgtttttccggatggccacccacggcttggaacgtaccatggaccagaaccaacgtctccgtgtcgccgccgccatcgccatcaagcaacagcagcagctgctcgggcaacgggtctcctactctgggcaagcattccagggacaccaatccgctgagagaggagaaaagagagaagtcgctgtgggttcccaagacgctccggatcgatgaccctgatgacgccgccaagagttcgatatgggccaccctcggcatcaagcccggtgaccctggcactttcatcaagcctttccagtccaaggtcgagagcaagggccagaggtcggacgctgctcaggtcttgcaggcgaacccagcggcgttgtcgcgcttacagtcgttccaggagagctcttgacttcatacgcaaagtctgccttatatagttatatatagttttggtactgtaatccttacatgctggtagagttttgtggcatgtggaaagtgacttcatacctgcagcctatcttattgtttgtttcggtactgtattccttactgcatgctagtagagctgtgcggtatgtggaaaggtcaacagagagcttcttgtttagccac

SEQ ID NO: 308 - protein, 556 aa, Zea mays
  REGION 168..230: note = Pfam Name: zf-Dof Pfam Description: Dof domain, zinc finger
  REGION 1..556: note = Ceres Clone ID no. 1599579
  REGION 1..556: note = Bit score of 418.6 for HMM based on sequences of Figure 2
  REGION 1..556: note = Functional Homolog Of SEQ ID NO. 263
MSDQKDPGIKLFGRVIPWGPETAPGTTEVEDPPQDELQPRAPEVAAAVDEDEHNEKEEKNANEVVVMPQEKGKETKVDTPQEEKGNEMEVDAPQKEHDDEMKIDAQREEKDEQTDANASPTHGNIEPANLPPSGLMDSAEDKAASDAKGENEKTSNEESGQDKALNKKPDKILPCPRCNSMDTKFCYYNNYNVNQPRHFCKNCQRYWTAGGTMRNVPVGAGRRKSKNASLHYRQLLMAPDCMLGPRVDISKPVLPEALASSPPAPTQPASRNGTVLKFGPEVPFCESMVSALNIDEQNVNSPGGPTARGENREDNNNPGSGTPPYNGVPETMAPVVGKNGAPVHCNGVAPVPQYYLGTPFMYPWSVGWSNVPVMVPGKSMPEPAPAPESCSTSSAVWMNPPMMPGSRPPSPAFPYPLVPPGLWGCFSGWPPTAWNVPWTRTNVSVSPPPSPSSNSSSCSGNGSPTLGKHSRDTNPLREEKREKSLWVPKTLRIDDPDDAAKSSIWATLGIKPGDPGTFIKPFQSKVESKGQRSDAAQVLQANPAALSRLQSFQESS

SEQ ID NO: 309 - DNA, 1485 bp, Populus balsamifera
  misc_feature 1..1485: note = Ceres Annot ID no. 1469831
  misc_feature 1..1485: note = Encodes the peptide sequence at SEQ ID NO. 310
  source 1..1485: mol_type = unassigned DNA; note = Populus balsamifera subsp. trichocarpa
atgaagggtgagtctaaagatccagctttcaagctctttggtaggaagattcctgtacctgatactcagtttccggccgaaccactagccaagggaacctgcagtgagataacaagagtagaaaccaagggtcctagtgaagacatctcagaagaacctgaaatgttctctggttctggacaaggcaaggaagaaagccaagctgcaatgcgagtgaatgaggcacaagtaattgctaagcataaggaaggtccactggagactaatggcacagaccaagagaaagtccttaagaagccagataaaattctaccatgtccacgatgcaacagtttagacacaaaattctgttacttcaataactataatgtcaaccaaccaaggcatttctgcaagaattgccaaagatattggacagctgggggatcaatgagaaatgtccctattggtgctggccggcggaagaataagcacttagccactcaatatcgtcagatattagtatcttctgatgggatgcctattgccagaatggaaaactcagactcaatcggtcaccaacttcaatcttctgttgaatccggaaccaccttgagtccctcagtagcaaatggaatggttctaaaattcggtcatgaagcacctctttgtgattccatggagaatgtgctgaatcttggagaccaaaagagatatgttgagataagttcagtcaatcgtcaagataatgtagaagagccgtcttcatgtggatcctccaagacagcttccaatgcttgggcaaacgaattgcgagaaaatattatgcagaaagagcaagttgatgtgccagcatcttctaacgaactcagcgcaccaaattccctgccttattattctgttccttcatgggtttttccttggaacccgggttggaataatgttgcttccatgaccgcagctcagcactccactggccaggcttgcgtgacaaatattcccaatcaagttcaattgtgctccacaccaatgttggctgttcccagcatttgccctccaaacattcctttacaatttgtacccgcttcttattggggttgcatgcccacatgggctgctggaacaagaaatgtatcattgagtggatcgaatggctgcctttctctatcaacctctgctaacaccagttcctgctcaggaaatggctcaccaaccctaggcaagcattctagagattcaaaatttatggaagaagagaaggcagaaaaatgtatattggtcccaaaaacactaagaattgatgacccaagtgaggcttcaaagagtcctttatgggctacattaggtcttaagcctgaccagaaggatcccgcatcaaaaggtactatcttcaagaattttgaaaccaaagcagaatgctatggccatgtatctgatatcactcatgtactggaagcaaacccagcagctctttctcgctctcatacattccaggagagtggctaa

SEQ ID NO: 310 - protein, 494 aa, Populus balsamifera
  REGION 99..161: note = Pfam Name: zf-Dof Pfam Description: Dof domain, zinc finger
  REGION 1..494: note = Ceres Annot ID no. 1469831
  REGION 1..494: note = Bit score of 411.8 for HMM based on sequences of Figure 2
  REGION 1..494: note = Functional Homolog Of SEQ ID NO. 263
  source 1..494: note = Populus balsamifera subsp. trichocarpa
MKGESKDPAFKLFGRKIPVPDTQFPAEPLAKGTCSEITRVETKGPSEDISEEPEMFSGSGQGKEESQAAMRVNEAQVIAKHKEGPLETNGTDQEKVLKKPDKILPCPRCNSLDTKFCYFNNYNVNQPRHFCKNCQRYWTAGGSMRNVPIGAGRRKNKHLATQYRQILVSSDGMPIARMENSDSIGHQLQSSVESGTTLSPSVANGMVLKFGHEAPLCDSMENVLNLGDQKRYVEISSVNRQDNVEEPSSCGSSKTASNAWANELRENIMQKEQVDVPASSNELSAPNSLPYYSVPSWVFPWNPGWNNVASMTAAQHSTGQACVTNIPNQVQLCSTPMLAVPSICPPNIPLQFVPASYWGCMPTWAAGTRNVSLSGSNGCLSLSTSANTSSCSGNGSPTLGKHSRDSKFMEEEKAEKCILVPKTLRIDDPSEASKSPLWATLGLKPDQKDPASKGTIFKNFETKAECYGHVSDITHVLEANPAALSRSHTFQESG

SEQ ID NO: 311 - protein, 515 aa, Arabidopsis thaliana
  REGION 133..195: note = Pfam Name: zf-Dof Pfam Description: Dof domain, zinc finger
  REGION 1..515: note = Public GI ID no. 9758342
  REGION 1..515: note = Bit score of 404.5 for HMM based on sequences of Figure 2
  REGION 1..515: note = Functional Homolog Of SEQ ID NO. 263
MADPAIKLFGKTIPLPELGVVDSSSSYTGFLTETQIPVRLSDSCTGDDDDEEMGDSGLGREEGDDVGDGGGESETDKKEEKDSECQEESLRNESNDVTTTTSGITEKTETTKAAKTNEESGGTACSQEGKLKKPDKILPCPRCNSMETKFCYYNNYNVNQPRHFCKKCQRYWTAGGTMRNVPVGAGRRKNKSPASHYNRHVSITSAEAMQKVARTDLQHPNGANLLTFGSDSVLCESMASGLNLVEKSLLKTQTVLQEPNEGLKITVPLNQTNEEAGTVSPLPKVPCFPGPPPTWPYAWNGVSWTILPFYPPPAYWSCPGVSPGAWNSFTWMPQPNSPSGSNPNSPTLGKHSRDENAAEPGTAFDETESLGREKSKPERCLWVPKTLRIDDPEEAAKSSIWETLGIKKDENADTFGAFRSSTKEKSSLSEGRLPGRRPELQANPAALSRKQTNSNKFKGTFIVIHMMYDSQNLESDLTYWTSVVVAATSLFSASAEERTTVFNFLDDRDVKCLPW

SEQ ID NO: 312 - protein, 447 aa, Arabidopsis thaliana
  REGION 105..167: note = Pfam Name: zf-Dof Pfam Description: Dof domain, zinc finger
  REGION 1..447: note = Public GI ID no. 21536859
  REGION 1..447: note = Bit score of 401.2 for HMM based on sequences of Figure 2
  REGION 1..447: note = Functional Homolog Of SEQ ID NO. 263
MMMETRDPAIKLFGMKIPFPSVFESAVTVEDDEEDDWSGGDDKSPEKVTPELSDKNNNNCNDNSFNNSKPETLDKEEATSTDQIESSETPEDNQQTTPDGKTLKKPTKILPCPRCKSMETKFCYYNNYNINQPRHFCKACQRYWTAGGTMRNVPVGAGRRKNKSSSSHYRHITISEALEAARLDPGLQANTRVLSFGLEAHQQHVAPMAPVMKLQGDQKVSNGARNGFHGLADQRLVARVENGDDCSSGSSVTTSNNHSVDESRAQSGRIVEPQMNNNNNMNGYACIPGVPWPYTWNPAMPPPGFYPPPGYPMPFYPYWTIPMISPSPHQSSSPISQKDSNTNSPTLGKRSRDEESSKRDSETERKQRTGCILVPKTLRIDDPNEAAKSSIWTTLGIKNEAMCKAGGMFKGFDHKTKMYNNDKAENSPVLSANPAALSRSHNFHEQI

SEQ ID NO: 313 - DNA, 1535 bp, Arabidopsis thaliana
  misc_feature 1..1535: note = Ceres Clone ID no. 113639
  misc_feature 1..1535: note = Encodes the peptide sequence at SEQ ID NO. 314
  source 1..1535: mol_type = unassigned DNA
accaattcacactctcccaaatctctcttctttaaatacaacaaaaaaaaaaatcacagagacatagagagaagaagaaacagagactccaaaaaaatgatgatggagactagagatccagctattaagcttttcggtatgaaaatcccttttccgtcggtttttgaatcggcagttacggtggaggatgacgaagaagatgactggagcggcggagatgacaaatcaccagagaaggtaactccagagttatcagataagaacaacaacaactgtaacgrcaacagttttaacaattcgaaacccgaaaccttggacaaagaggaagcgacatcaactgatcagatagagagtagtgagacgcctgaggataatcagcagacgacacctgatggtaaaaccctgaagaaaccgactaagattctgccgtgtccgagatgtaaaagcatggagaccaagttctgttattacaacaactacaacataaaccagcctcgtcatttctgcaaggcttgtcagagatattggactgctggagggactatgaggaatgttcctgtgggggcaggacgtcgtaagaacaaaagctcatcttctcattaccgtcacatcactatttccgaggctcttgaggctgcgaggcttgatccgggtttgcaggcaaacacaagggtcttgagttttggtctcgaagctcatcagcagcatgttgctcctatggcacctgtgatgaagctacaaggagatcaaaaggtctcaaacggagctaggaacgggtttcatgggttagcggatcaacggcttgtagctcgggtagagaatggagatgactgctcaagcggatcctctgtgaccacctctaacaatcactcagtggatgaatcaagagcacaaagcggcagaattgttgaaccacaaatgaacaacaataacaacatgaatggttatgcttgcatcccaggtgttccatggccttacacgtggaatccagcgatgcccccaccaggtttttacccgcctccagggtatccaatgccgttttacccttactggaccatcccaatgatatcaccgtcaccgcatcaatcctcatcgcctatcagccaaaaggattcaaatacaaactctcccactctcggaaaacgctcgagagatgaagaatcatcgaaaagggacagtgagacagagcgaaaacagaggaccgggtgcattctggtcccgaaaacgttgagaatagatgatcctaacgaagcagcaaagagctcgatatggacaacattgggaatcaagaacgaggcgatgtgcaaagccggtggtatgttcaaagggtttgatcataagacaaagatgtataacaacgacaaagccgagaactcccctgttctttctgctaaccctgctgctctatcaagatcacacaatttccatgaacagatttagagttacatatgtatatgtatatatgtatgattgattgtatgtatagatgatattggagaatgatgagtttttgagaatcaaactcttttcttctt

SEQ ID NO: 314 - protein, 447 aa, Arabidopsis thaliana
  REGION 105..167: note = Pfam Name: zf-Dof Pfam Description: Dof domain, zinc finger
  REGION 1..447: note = Ceres Clone ID no. 113639
  REGION 1..447: note = Bit score of 400.8 for HMM based on sequences of Figure 2
  REGION 1..447: note = Functional Homolog Of SEQ ID NO. 263
  UNSURE 62: note = X is any aa, unknown, or other
MMMETRDPAIKLFGMKIPFPSVFESAVTVEDDEEDDWSGGDDKSPEKVTPELSDKNNNNCNXNSFNNSKPETLDKEEATSTDQIESSETPEDNQQTTPDGKTLKKPTKILPCPRCKSMETKFCYYNNYNINQPRHFCKACQRYWTAGGTMRNVPVGAGRRKNKSSSSHYRHITISEALEAARLDPGLQANTRVLSFGLEAHQQHVAPMAPVMKLQGDQKVSNGARNGFHGLADQRLVARVENGDDCSSGSSVTTSNNHSVDESRAQSGRIVEPQMNNNNNMNGYACIPGVPWPYTWNPAMPPPGFYPPPGYPMPFYPYWTIPMISPSPHQSSSPISQKDSNTNSPTLGKRSRDEESSKRDSETERKQRTGCILVPKTLRIDDPNEAAKSSIWTTLGIKNEAMCKAGGMFKGFDHKTKMYNNDKAENSPVLSANPAALSRSHNFHEQI

SEQ ID NO: 315 - protein, 448 aa, Arabidopsis thaliana
  REGION 105..167: note = Pfam Name: zf-Dof Pfam Description: Dof domain, zinc finger
  REGION 1..448: note = Public GI ID no. 15232818
  REGION 1..448: note = Bit score of 399.6 for HMM based on sequences of Figure 2
  REGION 1..448: note = Functional Homolog Of SEQ ID NO. 263
MMMETRDPAIKLFGMKIPFPSVFESAVTVEDDEEDDWSGGDDKSPEKVTPELSDKNNNNCNDNSFNNSKPETLDKEEATSTDQIESSDTPEDNQQTTPDGKTLKKPTKILPCPRCKSMETKFCYYNNYNINQPRHFCKACQRYWTAGGTMRNVPVGAGRRKNKSSSSHYRHITISEALEAARLDPGLQANTRVLSFGLEAQQQHVAAPMTPVMKLQEDQKVSNGARNRFHGLADQRLVARVENGDDCSSGSSVTTSNNHSVDESRAQSGSVVEAQMNNNNNNNMNGYACIPGVPWPYTWNPAMPPPGFYPPPGYPMPFYPYWTIPMLPPHQSSSPISQKCSNTNSPTLGKHPRDEGSSKKDNETERKQKAGCVLVPKTLRIDDPNEAAKSSIWTTLGIKNEAMCKAGGMFKGFDHKTKMYNNDKAENSPVLSANPAALSRSHNFHEQI

SEQ ID NO: 316 - DNA, 1989 bp, Zea mays
  misc_feature 1..1989: note = Ceres Clone ID no. 1571328
  misc_feature 1..1989: note = Encodes the peptide sequence at SEQ ID NO. 317
  source 1..1989: mol_type = unassigned DNA
gcttgtggctgtgcacccctcgccgtggcccccacccaccttcttcccctcttatacccgctcgcctgtccatagcaggcagcagcacaccataccagatttgagatttcaatgaccttccttttgccggcctcctcgtctcctccggttccggctacctacctgcgggacgtcgacctcgtccgtctgtcgcctagctagctgcctcggttttcgcttgaagcagcagcagcagcaagccgggagcttctgtgtttgtttcgatcggagtgagaagaagatggttgcggagtgccaaggaggaggagacttcctcatcaagctcttcgggaagaccatccccgtgccggagccggagccggagtccggcgacgccaaggatcttcagcagagcagcagcaactggacggagatcgtggacgccgatgacgaccccaagaagcacagcgacggcgacgctgccaggcagagggagaagctgagggagcccgacaaggtgctgccgtgcccgcgctgtaacagcgcggacaccaagttctgctacttcaacaactacaacgcgaagcagccgcgccacttctgcaagcgctgccagcgctactggaccgcgggcggcgccatgcgcaacgtgccagtgggggccggccgccgcaagaacaagaacgccgccgcctcgcactcgcacctcctccataggacgacgacgactgccaacggcgcgatgctcagcttcgcccctcccggtcctggccttgcctgcctctgcctggacctcgccgcgcagttcggccacctggccccggtcagggacgccgccgggaccccgtctcgtccttgcacttgcagcgaagggtcgaccgacagggacggcacgtcttccgtcgtagacgaatctgcagcaagcggggacggaccagtgcagctgcaccaccacccagcaagcgttaacaccgggtggccgccatacagcagcccacctccggcggcgccgtatttctcgccgggcatctcgattccggtataccccgccgcgccggggtactggggctgcatggttcccggggcttggagcctgccatggccggtgcagccgcagcccccgtcgtcgcggtcgcaggggcagggcctctcgtcgtcgtcgtcgccgccgccgcccaccaccaccaccatcggtactccttcagtctcatcatcatccggggccgctgactttgactcccacgccctggggctgggcctgggcaagcacccgcgggaccgggacggcgacgacgggaggaagaggaacggcagtgcccatggcagcggcagcgccaaggtgtgggctcccaagaccatccggatagacgatgtggacgaggtggccaggagctccatctggtccctcgtcggggtcagaggcgacagggagcagcagggcgcagccgcgcaggtgacaagctcgggacagtgttcgagcccaggggcctgcaggccaccaagaaggccatggcgacaagctcgccgctccttcacgccaaccccgtcgcgctcacgcgctcggtggcgttccatgagggctcttgattttgccatctcaacatgatgctcctaatcagactgacagcactgatttgttttggataaatcatcagaggacccctcacatgcacgctgattcacatacctctttggttgcgtaggagaatcagactcctcgtatgcattgaccataactcgactcatgtttagtacgctgcatcttaaaaactgagcacacatacactggtgcaacctaatgttatttaggtgcacctgtagatacccagaaaacttacgtattcgggcggccaggctcacacgagcctcccatgcaagcagagatccaatcacactggtagctacttgtggacggcggggcggcacgcaatttggatgggagaaagaacaggagatcaataagaggttcctgctcgtagataaataaataacattatctaactttttcat

SEQ ID NO: 317 - protein, 434 aa, Zea mays
  REGION 69..131: note = Pfam Name: zf-Dof Pfam Description: Dof domain, zinc finger
  REGION 1..434: note = Ceres Clone ID no. 1571328
  REGION 1..434: note = Bit score of 398.3 for HMM based on sequences of Figure 2
  REGION 1..434: note = Functional Homolog Of SEQ ID NO. 263
MVAECQGGGDFLIKLFGKTIPVPEPEPESGDAKDLQQSSSNWTEIVDADDDPKKHSDGDAARQREKLREPDKVLPCPRCNSADTKFCYFNNYNAKQPRHFCKRCQRYWTAGGAMRNVPVGAGRRKNKNAAASHSHLLHRTTTTANGAMLSFAPPGPGLACLCLDLAAQFGHLAPVRDAAGTPSRPCTCSEGSTDRDGTSSVVDESAASGDGPVQLHHHPASVNTGWPPYSSPPPAAPYFSPGISIPVYPAAPGYWGCMVPGAWSLPWPVQPQPPSSRSQGQGLSSSSSPPPPTTTTIGTPSVSSSSGAADFDSHALGLGLGKHPRDRDGDDGRKRNGSAHGSGSAKVWAPKTIRIDDVDEVARSSIWSLVGVRGDREQQGAAAQVTSSGQCSSPGACRPPRRPWRQARRSFTPTPSRSRARWRSMRALDFAIST

SEQ ID NO: 318 - DNA, 1288 bp, Panicum virgatum
  misc_feature 1..1288: note = Ceres Clone ID no. 1868988
  misc_feature 1..1288: note = Encodes the peptide sequence at SEQ ID NO. 319
  source 1..1288: mol_type = unassigned DNA
gacacaaattgggcaaatctttttaccctttctggcgtcgccaactccacttgtcggatcttgcccatatgctatggagctcgccggagccgcgtcccctcggtcgccggaatcccacgtggcgccgccccgcccgcctccgcagccgccggagaaggatgcatgcgaagatacaggggacatgagtattactggggaaaagccatgcacacatcaggagttagactttggtcagacaaatagttctagccttaacagttccagtgagcgtgagaatcaggcacccagcaatgacgaaatgactggatcagagtccaatttggagacagccaagactgagggcgatgtaccgagtggagagaaggtcctgaagaaaccagataagatcctgccatgccctcgttgcaacagcatggatacaaagttctgttattacaacaactacaacattaagcaaccaaggcatttttgcaagagttgtcagaggtactggactgcaggtgggagcatgagaaatattcctgtcggtgctggtaggcgcaagagcaagagctctagttcgaattgccgcagcatattgattcccggcagtagtgtagccactcctgtgggagagtctaccctctttccattgcctatcaacggaaatcaagcagcagttaacttcgggcctgattcccctctctgcaactccatggcctcggtgctgaagattggaggggagcagagtaagaatgccaaccctgcctcaacagcacagccaagaaatggagaaacccagatttgcccaccttctacgacaacatcagacggtcctcggagtgaatctcataaaggaacagtgagtgcacatcagaatggagttgttgggcatggcaacggggtcacttccatgcatcctataccattcttccctggccctccttttgtgtacccatggagtccagcatggaatggcgttcctgccgcggcagcaccggtatgcccagccccagcagaagctgtgaattcttcagaaaatggcaacagtagtagtagtgttcaatggaattttccaccattggtgtcggtactgccaccaggattctgcggtgcacctattccagttcctgtaatgccatcttcagtttggccattcattacgccttggcccaatggagcatggaacacaccatggctcggacctggcgtgtcagcatcatctcccacaggcagcaccacatgttcagatagcgggtcacctgtcctggggaaacactcaagagactccagacctcaaggtgatgag

SEQ ID NO: 319 - protein, 405 aa, Panicum virgatum
  REGION 101..163: note = Pfam Name: zf-Dof Pfam Description: Dof domain, zinc finger
  REGION 1..405: note = Ceres Clone ID no. 1868988
  REGION 1..405: note = Bit score of 389.4 for HMM based on sequences of Figure 2
  REGION 1..405: note = Functional Homolog Of SEQ ID NO. 263
MELAGAASPRSPESHVAPPRPPPQPPEKDACEDTGDMSITGEKPCTHQELDFGQTNSSSLNSSSERENQAPSNDEMTGSESNLETAKTEGDVPSGEKVLKKPDKILPCPRCNSMDTKFCYYNNYNIKQPRHFCKSCQRYWTAGGSMRNIPVGAGRRKSKSSSSNCRSILIPGSSVATPVGESTLFPLPINGNQAAVNFGPDSPLCNSMASVLKIGGEQSKNANPASTAQPRNGETQICPPSTTTSDGPRSESHKGTVSAHQNGVVGHGNGVTSMHPIPFFPGPPFVYPWSPAWNGVPAAAAPVCPAPAEAVNSSENGNSSSSVQWNFPPLVSVLPPGFCGAPIPVPVMPSSVWPFITPWPNGAWNTPWLGPGVSASSPTGSTTCSDSGSPVLGKHSRDSRPQGDE

SEQ ID NO: 320 - protein, 380 aa, Cucurbita maxima
  REGION 35..97: note = Pfam Name: zf-Dof Pfam Description: Dof domain, zinc finger
  REGION 1..380: note = Public GI ID no. 1669341
  REGION 1..380: note = Bit score of 378.8 for HMM based on sequences of Figure 2
  REGION 1..380: note = Functional Homolog Of SEQ ID NO. 263
MNPEVLSTDENDKLATRKTEKEQNDAPNSKEKLKKPDKILPCPRCNSMETKFCYYNNYNVNQPRHFCKACQRYWTEGGTIRNVPVGAGRRKNKNSASHYRHITISEALRAAQIDVPIEVNHLASKGNGRVLNFSVSPPVCESMVNVSHPAERKVLNGTRNEFEGAKGPCEGGETGDDCSSASSVTMSSSMKNGARRFPQEPHMQNINGFPSQIPCLPGVPWPCSWTAPIPPPALCPPGVPLSFYPATYWSCSASGSWNIPWVTPQPCPPIPGPNSPTLGKHSRDGDELQADNSEMKDPPKQKNGSVLVPKTLRIDDPNEAAKSSIWETLGIKNDSIKAVDLSNVFQSKGDLKSNVSEVLSPVLQANPAALSRSLTFHERS

SEQ ID NO: 321 - protein, 420 aa, Vitis vinifera
  REGION 24..86: note = Pfam Name: zf-Dof Pfam Description: Dof domain, zinc finger
  REGION 1..420: note = Public GI ID no. 157359317
  REGION 1..420: note = Bit score of 346.9 for HMM based on sequences of Figure 2
  REGION 1..420: note = Functional Homolog Of SEQ ID NO. 263
MSGLQVHKDQGETNSSAQEKVLKKPDKILPCPRCNSLETKFCYFNNYNVNQPRHFCKNCQRYWTAGGTMRNVPVGAGRRKNKHLASQYRQIMVSSDGVPTTVIEASDSSNQQILSCGETSTTFRPSTASGTVLKFGPEAPLCKSMETVLSIREQKRCAEMRTVNCGGNGEEPSSCASSVSAPSFPENEFPENVGHKDRPSLPASRSEIHPQLHQPCYPVPPWAFPWNPGWTNVAPVAPPQCSSDTVYAPNNSNPNSVQWCSRPMLAVPGFCAPTIPLQLVPPSYWGCMPIWGAGTGNISLAGSNDCLSPSSSTSNSCSGNASPTLGKHSRDAQPAEEQKLEKCVLVPKTLRIIDPDEASKSSIWATLGIKPDQKAPISKGGIFKAFEPKSGAKTDLSDATQVLEANPAALSRSQTFKEST

SEQ ID NO: 322 - DNA, 458 bp, Glycine max
  misc_feature 1..458: note = Ceres Clone ID no. 638126
  misc_feature 1..458: note = Encodes the peptide sequence at SEQ ID NO. 323
  source 1..458: mol_type = unassigned DNA
tttatcagtcatggcgtcaagctctctcagcaaacaaaaggcttctgactcctcttggacaccaaaacagaacaagctgtttgaaaaagcacttgcaaaatatgacaaggatacccctgaccgatggcagaatgtagccaaagcagtaggtggaaaatctgcagatgaagttaagagacactatgaaatcctcttggaggatctgagacacattgagtctggtcatgttcctcttcccaagtacaagtccacaggaagcagcaccaatgttgaggaagaagagaggcttctgaagtatcttaaactgaattgatggaagcaatgtttatgttatcctcagctattggcagaatttatgtggccatccttgaatctgcggaaatatcttccctctctgttctatttcctgccattgtaatttagattgtttcaaatttcaatgaattatcctattctag

SEQ ID NO: 323 - protein, 100 aa, Glycine max
  REGION 13..62: note = Pfam Name: Myb_DNA-binding Pfam Description: Myb-like DNA-binding domain
  REGION 1..100: note = Ceres Clone ID no. 638126
  REGION 1..100: note = Bit score of 196.0 for HMM based on sequences of Figure 7
MASSSLSKQKASDSSWTPKQNKLFEKALAKYDKDTPDRWQNVAKAVGGKSADEVKRHYEILLEDLRHIESGHVPLPKYKSTGSSTNVEEEERLLKYLKLN

SEQ ID NO: 324 - protein, 96 aa, Vitis vinifera
  REGION 9..58: note = Pfam Name: Myb_DNA-binding Pfam Description: Myb-like DNA-binding domain
  REGION 1..96: note = Public GI ID no. 157340812
  REGION 1..96: note = Bit score of 192.4 for HMM based on sequences of Figure 7
  REGION 1..96: note = Functional Homolog Of SEQ ID NO. 323
MASGSRMGSGLWTSKQNKLFEKALALYDKDTPDRWQNVAKAVGGKSAEEVKRHYEILIEDLKHIESGHVPIPNYKSTGSNSIGDQEQRLLKCIKLQ

SEQ ID NO: 325 - DNA, 375 bp, Populus balsamifera
  misc_feature 1..375: note = Ceres Annot ID no. 1460824
  misc_feature 1..375: note = Encodes the peptide sequence at SEQ ID NO. 326
  source 1..375: mol_type = unassigned DNA; note = Populus balsamifera subsp. trichocarpa
atgtcttcaagctatcaagcttccagaaattctagatccgcttggacaccaagggaaaacaaactgtttgaaaaggcactagccttgtttgataaggacacaccggacaggtggcaaaatatagccaaagctgttggtggtgtgaaatctgccgaggaagtgaagaaacactatgaaatccttattgaagatcttcaacatatcgagtctggccgcattcctattcctaagtacaagtctagtggaagctgcaacaacacaaacgaagaggaaagtgaagttaataagaacaaactgcagatggcaactggcaatctccatattgactcattgagagtcctccaggatttcatggcagggtgtaatcaacattaa

SEQ ID NO: 326 - protein, 124 aa, Populus balsamifera
  REGION 12..62: note = Pfam Name: Myb_DNA-binding Pfam Description: Myb-like DNA-binding domain
  REGION 1..124: note = Ceres Annot ID no. 1460824
  REGION 1..124: note = Bit score of 189.9 for HMM based on sequences of Figure 7
  REGION 1..124: note = Functional Homolog Of SEQ ID NO. 323
  source 1..124: note = Populus balsamifera subsp. trichocarpa
MSSSYQASRNSRSAWTPRENKLFEKALALFDKDTPDRWQNIAKAVGGVKSAEEVKKHYEILIEDLQHIESGRIPIPKYKSSGSCNNTNEEESEVNKNKLQMATGNLHIDSLRVLQDFMAGCNQH

SEQ ID NO: 327 - protein, 100 aa, Arabidopsis thaliana
  REGION 11..60: note = Pfam Name: Myb_DNA-binding Pfam Description: Myb-like DNA-binding domain
  REGION 1..100: note = Public GI ID no. 145356202
  REGION 1..100: note = Bit score of 191.8 for HMM based on sequences of Figure 7
  REGION 1..100: note = Functional Homolog Of SEQ ID NO. 323
MASSSMSSQSSGSWTAKQNKAFEQALATYDQDTPNRWQNVAKVVGGKTTEEVKRHYELLVQDINSIENGHVPFPNYRTSGGCTNGRLSQEEKRMRNMRLQ

SEQ ID NO: 328 - DNA, 729 bp, Glycine max
  misc_feature 1..729: note = Ceres Clone ID no. 477814
  misc_feature 1..729: note = Encodes the peptide sequence at SEQ ID NO. 329
  source 1..729: mol_type = unassigned DNA
atcaactcttccttgagtctgatcactatatacacactactcttcagccttttcatatttcataacacccctttgctaccaaaccaattcagtgatctttttgctttgctctttcctgagtttgaaaaccttagaaccatttcagtacacaacactttctgttccttaatggcatccagttcaatctcagcctctggctcatggagtgttaaggacaacaaggcctttgaaaaggctttagctgtttatgacaaggacactcctgaccgttggtacaatgttgctcatgctgttggtggcaaaactccagaggaagtgaaaaggcactacgaactccttgttcaggatgttaagcatattgagtctggacgtgtgccattcccaaattacaagaaaactacttcagggtcaactgatcaggaggaaaaaaggctgaggaatttgaatttgaacctccagtgacccccctcaagaacaacaaattgattttctaattttcatatcaaccaacatcattaatttccagcatccctggtagtactacgtggtgttatgtcacacataattgctagtgcaatagcatcttaggctatattagtcatcataagaatcatatgtcccgtgattccatctggtactttcttgtcgttgaagcttcctcttgaaagggtcaacgaccgtttcagttcctcatcgtcctaaataaatttataattttataatatgctg

SEQ ID NO: 329 - protein, 97 aa, Glycine max
  REGION 9..58: note = Pfam Name: Myb_DNA-binding Pfam Description: Myb-like DNA-binding domain
  REGION 1..97: note = Ceres Clone ID no. 477814
  REGION 1..97: note = Bit score of 185.2 for HMM based on sequences of Figure 7
  REGION 1..97: note = Functional Homolog Of SEQ ID NO. 323
MASSSISASGSWSVKDNKAFEKALAVYDKDTPDRWYNVAHAVGGKTPEEVKRHYELLVQDVKHIESGRVPFPNYKKTTSGSTDQEEKRLRNLNLNLQ

SEQ ID NO: 330 - DNA, 735 bp, Gossypium hirsutum
  misc_feature 1..735: note = Ceres Clone ID no. 1914387
  misc_feature 1..735: note = Encodes the peptide sequence at SEQ ID NO. 331
  source 1..735: mol_type = unassigned DNA
accatcatccccttgacttcagtcttctcccttgacgggggcggcaatctcttcttcttcttcttccttcttagctactttctcttttgtcggttactcttcctttaagatctcatcttgaaagtcttacattcccttttttattcacccccaacgtaaaaaatggcatcctctattacgctttcacgtgattctaactcctactggactccaaagcaaaacaagctatttgaaagggcacttgctgtatatgacaaggacactccagaccgctggcaaaaggtggctgcagctgtgggggagaaatcagtcgaggaagtaagaaggcattatgagatcctagtgagggatctcatgtatatagaatctggtcaaatccctatacccaattacaaaagcactgggagtaacagaagatgaattgctggggtgcaaaggtttatgaagaatctaaggctccaatgaagcacaagtttcagctgcactgtcagagaatctgtaaaaactaaaataaaaagaataaattataaagaactggagaatttgcatcgtgattctccctgtcttattttacattgagtgatcgagtcagtttggttttttctttttgtgtgtgtgtgtcagtttgttaatatgacaacaaaagttgaactctacaattattaaatttgtgagtattgtactgaagttaccagttttaaattaaaaaaaaaaggtattactactaaatgctgg

SEQ ID NO: 331 - protein, 85 aa, Gossypium hirsutum
  REGION 12..61: note = Pfam Name: Myb_DNA-binding Pfam Description: Myb-like DNA-binding domain
  REGION 1..85: note = Ceres Clone ID no. 1914387
  REGION 1..85: note = Bit score of 158.6 for HMM based on sequences of Figure 7
  REGION 1..85: note = Functional Homolog Of SEQ ID NO. 323
MASSITLSRDSNSYWTPKQNKLFERALAVYDKDTPDRWQKVAAAVGEKSVEEVRRHYEILVRDLMYIESGQIPIPNYKSTGSNRR

SEQ ID NO: 332 - protein, 88 aa, Solanum lycopersicum
  REGION 11..60: note = Pfam Name: Myb_DNA-binding Pfam Description: Myb-like DNA-binding domain
  REGION 1..88: note = Public GI ID no. 7981380
  REGION 1..88: note = Bit score of 162.1 for HMM based on sequences of Figure 7
  REGION 1..88: note = Functional Homolog Of SEQ ID NO. 323
MSSMSSQHGSSGSWTAKQNKAFEKALAVYDKETRDRWSNVAKAVGGKTAEEVKRHYEILLRDVFFIDNGMVPFPKYKTTGGSHNSTSD

SEQ ID NO: 333 - DNA, 749 bp, Panicum virgatum
  misc_feature 1..749: note = Ceres Clone ID no. 1910072
  misc_feature 1..749: note = Encodes the peptide sequence at SEQ ID NO. 334
  source 1..749: mol_type = unassigned DNA
atcagctcatcagctcttgatctctagctagctagagagataagcttcctctcttcctctcggtcgagggagtgatcctctctcactctcaccaggagctcagctcgggtagctcaaggaggccagaagaagaaatggcgtcgctgtcgatgaccagcagctcggtgcgggcgcagtggacgaagaagcagaacaagctcttcgagcaggcgttggccgtgtacgacaaggacacccccgaccggtggcacaacatcgcccgcgccgtcggcggcaagtcagccgaggaggtcaggcgctactacgagatgctggaggaggatgtcaagcacatcgagtccggcaaggtgcccctccccgcctaccgctgccccggcggcgccggcgccggcgccctcggctacgaggccgacaggatgaagcatctgaagatctaggcgaacttcagaggatggtcaagaagaggctgcgcaggcacacgtgtatatatgattgggatagcatgcatgtccatgctactcctacgcaagtggtctggaagaagcaagaagaatcagatgagatgcatgcatgtcataattaattaattaattaattaataattagtatggggatgatcgagtagtatcctagcctgtcacgcgagatcgaccgacccatcgatctcccagcatgtgtccttcgtacccacgcgcgtatgtgtattatatcctagctgcatctgtgtaccataccaatcagaaacatga

SEQ ID NO: 334 - protein, 100 aa, Panicum virgatum
  REGION 12..61: note = Pfam Name: Myb_DNA-binding Pfam Description: Myb-like DNA-binding domain
  REGION 1..100: note = Ceres Clone ID no. 1910072
  REGION 1..100: note = Bit score of 182.3 for HMM based on sequences of Figure 7
  REGION 1..100: note = Functional Homolog Of SEQ ID NO. 323
MASLSMTSSSVRAQWTKKQNKLFEQALAVYDKDTPDRWHNIARAVGGKSAEEVRRYYEMLEEDVKHIESGKVPLPAYRCPGGAGAGALGYEADRMKHLKI

SEQ ID NO: 335 - DNA, 675 bp, Zea mays
  misc_feature 1..675: note = Ceres Clone ID no. 331755
  misc_feature 1..675: note = Encodes the peptide sequence at SEQ ID NO. 336
  source 1..675: mol_type = unassigned DNA
agaatgcaaaccacaaaacaaagtcaaaccagctgcaacgatcaagagcgaggcttccttgtccagctctccgctcagccgacacacacagattgacagatggcgtctatgtcgctgagctcgtcgagggcgcagtggacggcgaagcagaacaagctgttcgagcaggcgttggcggtgtacgacagggacacgccggaccgctggcacaacatcgcgcgcgccgtgggtggcaagtcggcggacgaggtcaggcgctactacgagctgctggtgaaggacttggagcacatcgaggccggcaaggtggccttccccgcgtacaggtgccccggcggctacgacgacgccgacagcgacaggctgaagcacctgacctgaagatctaggcggcaggcaagcatcatgagaaccactgaacaagtacgtcctacatacgtacacttcgcgccatgtgagtgtagcacgtgtggctacaaaagaagcaagccaagcgagtgggtcggacggattatctgttcaagcacgcatgtgaattagaattactactagcaatagctataggatgttgatcaatcgatctccgttccccccgtgttgcgatgtaaaatctcagcatctgtagcatatatattctgaggagtgaaataaaatacattcactagtttgtggacc

SEQ ID NO: 336 - protein, 93 aa, Zea mays
  REGION 10..59: note = Pfam Name: Myb_DNA-binding Pfam Description: Myb-like DNA-binding domain
  REGION 1..93: note = Ceres Clone ID no. 331755
  REGION 1..93: note = Bit score of 175.6 for HMM based on sequences of Figure 7
  REGION 1..93: note = Functional Homolog Of SEQ ID NO. 323
MASMSLSSSRAQWTAKQNKLFEQALAVYDRDTPDRWHNIARAVGGKSADEVRRYYELLVKDLEHIEAGKVAFPAYRCPGGYDDADSDRLKHLT

SEQ ID NO: 337 - protein, 92 aa, Medicago truncatula
  REGION 9..58: note = Pfam Name: Myb_DNA-binding Pfam Description: Myb-like DNA-binding domain
  REGION 1..92: note = Public GI ID no. 124360540
  REGION 1..92: note = Bit score of 178.1 for HMM based on sequences of Figure 7
  REGION 1..92: note = Functional Homolog Of SEQ ID NO. 323
MASSSMSASGSWSVKENKAFERALAVYDKDTPDRWYNVAHAVGGKTPEEVKKHYELLVEDIKHIESGKVPFPNYKKISVSHEEKRMRNMSLH

SEQ ID NO: 338 - protein, 102 aa, Vitis vinifera
  REGION 13..62: note = Pfam Name: Myb_DNA-binding Pfam Description: Myb-like DNA-binding domain
  REGION 1..102: note = Public GI ID no. 157335318
  REGION 1..102: note = Bit score of 170.5 for HMM based on sequences of Figure 7
  REGION 1..102: note = Functional Homolog Of SEQ ID NO. 323
MASHAFSSSCYSSSSWTQKQNKLFEEALALYDKNTPDRWANIAKAVGGKSAEEVKRHYEILEQDVMHIENGQVPLPIYRSTGSSSGGSVDEQRHLLKNLKLR

SEQ ID NO: 339 - DNA, 279 bp, Populus balsamifera
  misc_feature 1..279: note = Ceres Annot ID no. 1503394
  misc_feature 1..279: note = Encodes the peptide sequence at SEQ ID NO. 340
  source 1..279: mol_type = unassigned DNA; note = Populus balsamifera subsp. trichocarpa
atgtcttccagccatcaaactccaaggaattctagctcctcttggacaccaagggaaaacaaactgtttgaaaaggctctagccttgtttgataaggacacaccggaccggtggcaaaatatagccaaagctgttggtggcgtgaaatcagctgaggaaatgaagagacactacgaaatcctcattgaagatcttaaacatatcgagtccggccgtgttcctattcctaattacaagtccagtagaagctacagcaatacaaacgaagaagaaaggtaa

SEQ ID NO: 340 - protein, 92 aa, Populus balsamifera
  REGION 12..62: note = Pfam Name: Myb_DNA-binding Pfam Description: Myb-like DNA-binding domain
  REGION 1..92: note = Ceres Annot ID no. 1503394
  REGION 1..92: note = Bit score of 163.2 for HMM based on sequences of Figure 7
  REGION 1..92: note = Functional Homolog Of SEQ ID NO. 323
  source 1..92: note = Populus balsamifera subsp. trichocarpa
MSSSHQTPRNSSSSWTPRENKLFEKALALFDKDTPDRWQNIAKAVGGVKSAEEMKRHYEILIEDLKHIESGRVPIPNYKSSRSYSNTNEEER

SEQ ID NO: 341 - DNA, 315 bp, Populus balsamifera
  misc_feature 1..315: note = Ceres Annot ID no. 1442707
  misc_feature 1..315: note = Encodes the peptide sequence at SEQ ID NO. 342
  source 1..315: mol_type = unassigned DNA; note = Populus balsamifera subsp. trichocarpa
atgtcttatttcacatcttcaaatggctccggctcctcttggacagccaaacaaaataagctattcgagaaggccctggctgtatacgacaaagacaccccagaccgctggcaaaatgtggccaaggccgtgggtggcaagtctcctgaagaagttaagaggcactatgatcgtctcgtggaagatctcgtgtacatagaatccggccaagcccctctgccgaattacaagccctctggcagcaatggtaggggacttgttgaagagcaaaggctagctatggtctatccatcatcgatctattcaacttcctaa

SEQ ID NO: 342 - protein, 104 aa, Populus balsamifera
  REGION 11..60: note = Pfam Name: Myb_DNA-binding Pfam Description: Myb-like DNA-binding domain
  REGION 1..104: note = Ceres Annot ID no. 1442707
  REGION 1..104: note = Bit score of 159.1 for HMM based on sequences of Figure 7
  REGION 1..104: note = Functional Homolog Of SEQ ID NO. 323
  source 1..104: note = Populus balsamifera subsp. trichocarpa
MSYFTSSNGSGSSWTAKQNKLFEKALAVYDKDTPDRWQNVAKAVGGKSPEEVKRHYDRLVEDLVYIESGQAPLPNYKPSGSNGRGLVEEQRLAMVYPSSIYSTS

SEQ ID NO: 343 - protein, 75 aa, Vitis vinifera
  REGION 9..58: note = Pfam Name: Myb_DNA-binding Pfam Description: Myb-like DNA-binding domain
  REGION 1..75: note = Public GI ID no. 147784500
  REGION 1..75: note = Bit score of 136.5 for HMM based on sequences of Figure 7
  REGION 1..75: note = Functional Homolog Of SEQ ID NO. 323
MASTSLKSSGSWTPKQNKLFEKALALYDRDTPDRWQNVANAVGGKSAEEVKQHYEILIRDLKHIESGRVPIPNYK

SEQ ID NO: 344 - DNA, 273 bp, Populus balsamifera
  misc_feature 1..273: note = Ceres Annot ID no. 1514100
  misc_feature 1..273: note = Encodes the peptide sequence at SEQ ID NO. 345
  source 1..273: mol_type = unassigned DNA; note = Populus balsamifera subsp. trichocarpa
atggcatcaagctcaatgtcctctcgcggttcgggctcgtggactgttcagcagaacaaagcctttgaaagggctttggctgtgtatgacagagacacgcccgatcgctggtacaatgtagccagggcagtcggtggaaaaaccgcagaagaagtgaaaaggcactatgaactgcttgtggaggatgtgaagcatattgagtcgggccatgttcccttccctaattacaggactaccggggcaaatggccacgcaagagacgggattgtttag

SEQ ID NO: 345 - protein, 90 aa, Populus balsamifera
  REGION 11..60: note = Pfam Name: Myb_DNA-binding Pfam Description: Myb-like DNA-binding domain
  REGION 1..90: note = Ceres Annot ID no. 1514100
  REGION 1..90: note = Bit score of 165.2 for HMM based on sequences of Figure 7
  REGION 1..90: note = Functional Homolog Of SEQ ID NO. 323
  source 1..90: note = Populus balsamifera subsp. trichocarpa
MASSSMSSRGSGSWTVQQNKAFERALAVYDRDTPDRWYNVARAVGGKTAEEVKRHYELLVEDVKHIESGHVPFPNYRTTGANGHARDGIV

SEQ ID NO: 346 - DNA, 294 bp, Arabidopsis thaliana
  misc_feature 1..294: note = Ceres Annot ID no. 850366
  misc_feature 1..294: note = Encodes the peptide sequence at SEQ ID NO. 347
  source 1..294: mol_type = unassigned DNA
atggcatcaagctcaatgtcttctcagagctctggctcgtggactgctaagcagaacaaagcctttgagcaggctctagcaacctatgaccaggacactcctaaccgttggcaaaatgttgccaaagtcgtgggtggaaaaacaacagaggaggtaaagagacactacgaactcttagtgcaagacatcaacagcatagagaacggtcatgttccattcccaaactacaggactagtggaggctgcactaatggcaggcttagtcaggaggaaaaaaggtatgtattgtcctaa

SEQ ID NO: 347 - protein, 97 aa, Arabidopsis thaliana
  REGION 11..60: note = Pfam Name: Myb_DNA-binding Pfam Description: Myb-like DNA-binding domain
  REGION 1..97: note = Ceres Annot ID no. 850366
  REGION 1..97: note = Bit score of 174.5 for HMM based on sequences of Figure 7
  REGION 1..97: note = Functional Homolog Of SEQ ID NO. 323
MASSSMSSQSSGSWTAKQNKAFEQALATYDQDTPNRWQNVAKVVGGKTTEEVKRHYELLVQDINSIENGHVPFPNYRTSGGCTNGRLSQEEKRYVLS

SEQ ID NO: 348 - DNA, 303 bp, Arabidopsis thaliana
  misc_feature 1..303: note = Ceres Annot ID no. 543794
  misc_feature 1..303: note = Encodes the peptide sequence at SEQ ID NO. 349
  source 1..303: mol_type = unassigned DNA
atggcctctagttctatgagctcgagctcttcttggacgtctaagcaaaacaagatgttcgagagggctttagccgtttacgataaagacactcccgaccgttggcaaaacgtggctaaagcagttggaagtaaatctgcagaggaagttaaacgtcactacgacatcctcgttgaagatctcatgaacatcgaacaagacttagtacctttgcctaaatacaaaaccgtcgatgttggaagtaaatctagaggcatcgatgattttgatttgaggttaatgaagaatatgagaatccagtga

SEQ ID NO: 349 - protein, 100 aa, Arabidopsis thaliana
  REGION 1..100: note = Ceres Annot ID no. 543794
  REGION 9..66: note = Pfam Name: Myb_DNA-binding Pfam Description: Myb-like DNA-binding domain
  REGION 1..100: note = Bit score of 158.4 for HMM based on sequences of Figure 7
  REGION 1..100: note = Functional Homolog Of SEQ ID NO. 323
MASSSMSSSSSWTSKQNKMFERALAVYDKDTPDRWQNVAKAVGSKSAEEVKRHYDILVEDLMNIEQDLVPLPKYKTVDVGSKSRGIDDFDLRLMKNMRIQ

SEQ ID NO: 350 - DNA, 327 bp, Populus balsamifera
  misc_feature 1..327: note = Ceres Annot ID no. 1495620
  misc_feature 1..327: note = Encodes the peptide sequence at SEQ ID NO. 351
  source 1..327: mol_type = unassigned DNA; note = Populus balsamifera subsp. trichocarpa
atgtcttatttcacatcttcaaatggctccggctcctcttggacagccaaacaaaataagctattcgagaaggccctggctgtatacgacaaagacaccccagaccgctggcaaaatgtggccaaggccgtgggtggcaagtctcctgaagaagttaagaggcactatgatcgtctcgtggaagatctcgtgtacatagaatccggccaagcccctctgccgaattacaagccctctggcagcaatggtaggggacttgttgaagagcaaagaccatttaatccaactccaaaaagttttgaatttgtacgatccctgtttgcctag

SEQ ID NO: 351 - protein, 108 aa, Populus balsamifera
  REGION 11..60: note = Pfam Name: Myb_DNA-binding Pfam Description: Myb-like DNA-binding domain
  REGION 1..108: note = Ceres Annot ID no. 1495620
  REGION 1..108: note = Bit score of 154.5 for HMM based on sequences of Figure 7
  REGION 1..108: note = Functional Homolog Of SEQ ID NO. 323
  source 1..108: note = Populus balsamifera subsp. trichocarpa
MSYFTSSNGSGSSWTAKQNKLFEKALAVYDKDTPDRWQNVAKAVGGKSPEEVKRHYDRLVEDLVYIESGQAPLPNYKPSGSNGRGLVEEQRPFNPTPKSFEFVRSLFA

SEQ ID NO: 352 - DNA, 469 bp, Glycine max
  misc_feature 1..469: note = Ceres Clone ID no. 1653552
  misc_feature 1..469: note = Encodes the peptide sequence at SEQ ID NO. 353
  source 1..469: mol_type = unassigned DNA
aacacatcagctcttccttgagtctgatcactacacactactcttcagccttttcatatcaccctttgctaccaaaccaattcagtctctttgcttgttctacctgagtttgaaacgtaaccttagaaccatttcacacaacactttctgttccttaattcctgaaagaaaatggcatcttgttcaatctcagcctcaggctcatggagtgttaaggacaacaaggcctttgaaaaggctctagctgtttatgacaaggacacccctgaccgttggtacaatgttgctcatgctgttggcggcaaaactccagaggaagtgaagaggcactacgaactccttgttcaggatgttaagcatattgagtcaggacgtgttccattcccaaattacaagaaaactacttcagagtcaactgatcaggaggaaaaaaggctgaggaatttgaatttgaacctccagtgacccc

SEQ ID NO: 353 - protein, 97 aa, Glycine max
  REGION 9..58: note = Pfam Name: Myb_DNA-binding Pfam Description: Myb-like DNA-binding domain
  REGION 1..97: note = Ceres Clone ID no. 1653552
  REGION 1..97: note = Bit score of 184.1 for HMM based on sequences of Figure 7
  REGION 1..97: note = Functional Homolog Of SEQ ID NO. 323
MASCSISASGSWSVKDNKAFEKALAVYDKDTPDRWYNVAHAVGGKTPEEVKRHYELLVQDVKHIESGRVPFPNYKKTTSESTDQEEKRLRNLNLNLQ

SEQ ID NO: 354 - protein, 96 aa, Vitis vinifera
  REGION 7..56: note = Pfam Name: Myb_DNA-binding Pfam Description: Myb-like DNA-binding domain
  REGION 1..96: note = Public GI ID no. 147767321
  REGION 1..96: note = Bit score of 164.7 for HMM based on sequences of Figure 7
  REGION 1..96: note = Functional Homolog Of SEQ ID NO. 323
MSSRSSGSSWTAKQNKAFEEALAVYDKDTPDRWYNVARAVGGKTVEEVKRHYEILVEDIKSIDSDKVPFPNYKTTGASSRSNMSDQEKRMMNLKLR

SEQ ID NO: 355 - DNA, 237 bp, Populus balsamifera
  misc_feature 1..237: note = Ceres Annot ID no. 1510450
  misc_feature 1..237: note = Encodes the peptide sequence at SEQ ID NO. 356
  source 1..237: mol_type = unassigned DNA; note = Populus balsamifera subsp. trichocarpa
atgtcttccaattctctcacctcttggacacctaagcaaaacaaactattcgaaaaggccctggctttacatgacaaggacacccctgaccgctggcataatgttgccaaagctgtgggtgggaaatctgcagaggaagtgaagaggcactatgagattctcatcaaggatgtcagggaaattgagtctggcagagttccattccctaattacaggtcaagtggaaacggcaactaa

SEQ ID NO: 356 - protein, 78 aa, Populus balsamifera
  REGION 6..55: note = Pfam Name: Myb_DNA-binding Pfam Description: Myb-like DNA-binding domain
  REGION 1..78: note = Ceres Annot ID no. 1510450
  REGION 1..78: note = Bit score of 137.5 for HMM based on sequences of Figure 7
  REGION 1..78: note = Functional Homolog Of SEQ ID NO. 323
  source 1..78: note = Populus balsamifera subsp. trichocarpa
MSSNSLTSWTPKQNKLFEKALALHDKDTPDRWHNVAKAVGGKSAEEVKRHYEILIKDVREIESGRVPFPNYRSSGNGN

SEQ ID NO: 357 - protein, 97 aa, Glycine max
  REGION 9..58: note = Pfam Name: Myb_DNA-binding Pfam Description: Myb-like DNA-binding domain
  REGION 1..97: note = Public GI ID no. 110931736
  REGION 1..97: note = Bit score of 183.1 for HMM based on sequences of Figure 7
  REGION 1..97: note = Functional Homolog Of SEQ ID NO. 323
  UNSURE 94: note = X is any aa, unknown, or other
MASCSISASGSWSVKDNKAFEKALAVYDKDTPDRWYNVAHAVGGKTPEEVKRHYELLVQDVKHIESGRVPFPNYKKTTSESTDQEEKRLRNLNXNLQ

SEQ ID NO: 358 - DNA, 665 bp, Gossypium hirsutum
  misc_feature 1..665: note = Ceres Clone ID no. 1916884
  misc_feature 1..665: note = Encodes the peptide sequence at SEQ ID NO. 359
  source 1..665: mol_type = unassigned DNA
acacaccgcaccttgacttgaagtaaccttttgagagaaaaagtccatctattcccttccatcatcgtttcaatttattcaacctttctctcaaattcagtcacaggcatatttattttaagttttagcctgccattcacccgagcttgtcgataaatcctctgttttcaatagttgcatttggattttcatcaaatggcatcccattctctcagttcttcacgtagctctaactcctcctggacacctaagcaaaacaaaatgttcgagaaggctctggctgaatttgaccaggacactcctgagcgctggattaatattgctaaagctgtgggtggaaagtcagctgaggaagtcaagcagcactatgagatcctagtcagggatgtcaaagagatcgagtctggacggtacccttatccatatccaagtgggagcagcaactaaagcagtgagttatcagcttaccgtatccaaagggttctctgaagggtcaaagatcatagtgaaagaacattatattatgcaaccagagacctcaattgcaggaagactattatagaatattccccaggaaaatattattatttgctttatttatctttttgtatttttctttgaccttgtctagttagattaaatgttaaatatattttattgatatt

SEQ ID NO: 359 - protein, 83 aa, Gossypium hirsutum
  REGION 13..62: note = Pfam Name: Myb_DNA-binding Pfam Description: Myb-like DNA-binding domain
  REGION 1..83: note = Ceres Clone ID no. 1916884
  REGION 1..83: note = Bit score of 122.1 for HMM based on sequences of Figure 7
  REGION 1..83: note = Functional Homolog Of SEQ ID NO. 323
MASHSLSSSRSSNSSWTPKQNKMFEKALAEFDQDTPERWINIAKAVGGKSAEEVKQHYEILVRDVKEIESGRYPYPYPSGSSN

SEQ ID NO: 360 - DNA, 1123 bp, Gossypium hirsutum
  misc_feature 1..1123: note = Ceres Clone ID no. 1847251
  misc_feature 1..1123: note = Encodes the peptide sequence at SEQ ID NO. 361
  source 1..1123: mol_type = unassigned DNA
ataccactcccttaacttcaaacaaaatcttcttttaagagtcccttccatcaccttgctttcacattcaggcacctgcatacttcttttaacttttcagccctataattctctcacttaagattttcaccaatggcatctaattctctcacttcctcacgtacctctggctcgtcctggacggcaaagcaaaacaaactgttcgagaaggctctggctaaatatgacaaagacactcctgaccgctggcataacattgccaaggctgtgggtggaaagtcagttgaggaagtcaagctgcactatgagatcctagtcagggatctcaaagacattgagtctggccgctacccttatccatatccaaccaactaaagcgctatgagtttactacttactattcactacctatccacaatcactatagataaccaagaagtgaaggccactttcatatgcatgaatcacattcctaaaaatgcagctgtcatgcttttttgttgatgtagttgtggatttaaagaaaacgtggttcttagaattatcatacatgcgcatatccatgacgtccttgtccttccagctccacacacccacaaccccaaagtccttaagcattgaaaactctcaagtacccaagtgggtccataaaagaaaatccagaaaagtagggaatcttcatgtgcctcccccccccccccccaaatttctttctgtggtctatcactttaaatttttttcctttttccactgagcatatacagttcatttgcatttaatgttcttatagacctaattccttacaattactcaatcctaatctcaaatctttcgactctttttgtctttttggattttggacaacatgccgatggtacttttgtcatttccaacatattttatcttaattatctgcatttgtttttctcacaggagcaaatcaataaattccgtttctagagacttaacttgtcctacttgtctttcaggttagctgaagactatgaatatatatatgcatctagagacctcagttgctgagagactagcctagttccccacctaaagaaatccatacaaaactaattatcccattggtgtaatactaaatgctgttactacc

SEQ ID NO: 361 - protein, 80 aa, Gossypium hirsutum
  REGION 13..62: note = Pfam Name: Myb_DNA-binding Pfam Description: Myb-like DNA-binding domain
  REGION 1..80: note = Ceres Clone ID no. 1847251
  REGION 1..80: note = Bit score of 115.8 for HMM based on sequences of Figure 7
  REGION 1..80: note = Functional Homolog Of SEQ ID NO. 323
MASNSLTSSRTSGSSWTAKQNKLFEKALAKYDKDTPDRWHNIAKAVGGKSVEEVKLHYEILVRDLKDIESGRYPYPYPTN

SEQ ID NO: 362 - DNA, 339 bp, Populus balsamifera
  misc_feature 1..339: note = Ceres Annot ID no. 1457249
  misc_feature 1..339: note = Encodes the peptide sequence at SEQ ID NO. 363
  source 1..339: mol_type = unassigned DNA; note = Populus balsamifera subsp. trichocarpa
atgtcttccaattctctcacctcttggacacctaagcaaaacaaactattcgaaaaggccctggctttacatgacaaggacacccctgaccgctggcataatgttgccaaagctgtgggtgggaaatctgcagaggaagtgaagaggcactatgagattctcatcaaggatgtcagggaaattgagtctggcagagttccattccctaattacagattaatgtcatatacaagtattaaagcatcatttaagccaggatacaggcaacgtagatttctgatctttcaggacaaattccatgggaatggtcaatcaaattctgcaccgtcattcgcctaa

SEQ ID NO: 363 - protein, 112 aa, Populus balsamifera
  REGION 6..55: note = Pfam Name: Myb_DNA-binding Pfam Description: Myb-like DNA-binding domain
  REGION 1..112: note = Ceres Annot ID no. 1457249
  REGION 1..112: note = Bit score of 146.4 for HMM based on sequences of Figure 7
  REGION 1..112: note = Functional Homolog Of SEQ ID NO. 323
  source 1..112: note = Populus balsamifera subsp. trichocarpa
MSSNSLTSWTPKQNKLFEKALALHDKDTPDRWHNVAKAVGGKSAEEVKRHYEILIKDVREIESGRVPFPNYRLMSYTSIKASFKPGYRQRRFLIFQDKFHGNGQSNSAPSFA

SEQ ID NO: 364 - DNA, 518 bp, Glycine max
  misc_feature 1..518: note = Ceres Clone ID no. 1113584
  misc_feature 1..518: note = Encodes the peptide sequence at SEQ ID NO. 365
  source 1..518: mol_type = unassigned DNA
aatcacacctctttaattagtaacacttaattttcattaccgtcgttttattaagtgtgtgttgctacaacaatggcctcaagtcagggttggactccgaagcagaacaagagatttgagaatgcccttgccatcttcgacaaggacaccccagacaggtggcacacggtggccagggccgtcggaggaaaaacggtggaggaagtgaaaaggcattatgagaagctcgtggaagatgtgaaggagattgaggaaggtcacgtgcccctccccaattaccgaagtgctgcaagaggccacggttacatggatgaagaaaacaggatgaaggttctgagtctgcagtgaagtgtgatttatcaataatatatataatatatgctggatgcttggcttagaactactataaaatattttatttgctttttcgttttttctttccatatatatatatattcaaagcatcgatgccttgtatttctgtttctataaatgtaaagatgaaatgaaattgtccc

SEQ ID NO: 365 - protein, 91 aa, Glycine max
  REGION 4..53: note = Pfam Name: Myb_DNA-binding Pfam Description: Myb-like DNA-binding domain
  REGION 1..91: note = Ceres Clone ID no. 1113584
  REGION 1..91: note = Bit score of 141.8 for HMM based on sequences of Figure 7
  REGION 1..91: note = Functional Homolog Of SEQ ID NO. 323
MASSQGWTPKQNKRFENALAIFDKDTPDRWHTVARAVGGKTVEEVKRHYEKLVEDVKEIEEGHVPLPNYRSAARGHGYMDEENRMKVLSLQ

SEQ ID NO: 366 - DNA, 656 bp, Gossypium hirsutum
  misc_feature 1..656: note = Ceres Clone ID no. 1927753
  misc_feature 1..656: note = Encodes the peptide sequence at SEQ ID NO. 367
  source 1..656: mol_type = unassigned DNA
aagtaattttctttgagagaaataaccccatcttttccctttatacaagtttcaatttattcactctttcaaattcaggaactgacatagttctctaaatttttagcctgtcattctgatccgaagcttgttaaaaagaccctctgttttcagttgtacttattttcacttatgtcatccaattttctcaataattcacgctgctctagctcttcctggacacctaaacaaaacaaaacgttcgagaaggctctggctaaatatgaccaggacactcctgaccgctggcacaatgttgccaaggctgtgggtggaaagtctgctgaggaagtcaagctgcactatgatgccctagtcagggatctcaaagacattgagtctggccgctacccttatccatatccaagtggaagcaacagctaaagtggttcccaaagagtcaagtactaaaatgaaaaagaacatgatactcacaaaaccagagacctcagtcgcacagtcgcagaaatctagcattggatgatattcccccagaaaaaaagaaaatccctactgtaattgtacatgctgctattactattttctgtattatcactttgtattttcctttgaccttgtctagttaaattaaaatattaaatatttatatagtaatt

SEQ ID NO: 367 - protein, 83 aa, Gossypium hirsutum
  REGION 13..62: note = Pfam Name: Myb_DNA-binding Pfam Description: Myb-like DNA-binding domain
  REGION 1..83: note = Ceres Clone ID no. 1927753
  REGION 1..83: note = Bit score of 110.7 for HMM based on sequences of Figure 7
  REGION 1..83: note = Functional Homolog Of SEQ ID NO. 323
MSSNFLNNSRCSSSSWTPKQNKTFEKALAKYDQDTPDRWHNVAKAVGGKSAEEVKLHYDALVRDLKDIESGRYPYPYPSGSNS

SEQ ID NO: 368 - DNA, 551 bp, Glycine max
  misc_feature 1..551: note = Ceres Clone ID no. 857342
  misc_feature 1..551: note = Encodes the peptide sequence at SEQ ID NO. 369
  source 1..551: mol_type = unassigned DNA
aaaatcacagctctttaatttgtaacacttaattttcattgattgagtgtgtgttgctacaacaatggcctcaagccagggttggactccgaagcagaacaagagatttgagaatgcccttgccatcttcgacaaggacaccccagataggtggcacacggtggccagggccgtcggaggaaaaacggtggaggaagtgaaaaggcattatgagaagctcgtggaagatgtgaagaagatagaggaaggtcacgtgcccctccccaattaccgaagtgctgcaagaggctacggttacatggatgaagaaaccaggatgaaggctctgagtctgcagtgaagtgtgatttaccaataaataatatatgttggatgcttggcttagtaccataagatattttattcacttttttgttttttctttccatataatatataggcaaagcatcgttgccttgtgtttctgtttctataaatgtaaagatgaaattgtcccaaagacgggcccactagttaatagtaaaaacagccattgaatatcatattttcac

SEQ ID NO: 369 - protein, 91 aa, Glycine max
  REGION 4..53: note = Pfam Name: Myb_DNA-binding Pfam Description: Myb-like DNA-binding domain
  REGION 1..91: note = Ceres Clone ID no. 857342
  REGION 1..91: note = Bit score of 139.8 for HMM based on sequences of Figure 7
  REGION 1..91: note = Functional Homolog Of SEQ ID NO. 323
MASSQGWTPKQNKRFENALAIFDKDTPDRWHTVARAVGGKTVEEVKRHYEKLVEDVKKIEEGHVPLPNYRSAARGYGYMDEETRMKALSLQ

SEQ ID NO: 370 - DNA, 489 bp, Gossypium hirsutum
  misc_feature 1..489: note = Ceres Clone ID no. 100068619
  misc_feature 1..489: note = Encodes the peptide sequence at SEQ ID NO. 371
  source 1..489: mol_type = unassigned DNA
ctctttttcttttcttctcttttctttggcctcagacccttaatttcgattgttaattatcactgttctgcaatggcgtcaggttcgaactggacgccaaagcaaaacaagttgttcgagaacgctttagctatctacgacaaggatacaccagaccggtggcacaagctagccagggctgtcggggggaagaccgtggaggaagtgaagttgcattaccagaaccttgtggatgacatcaagcagatagagtctgggcacgtgcctttgcccccttataagaaagctggagggaaccaaggatacaacaatttcatggacgatgaagaaccaaggatgaggaatctcaggctttagtgaagtatgaaccagaaatagctgtagaatatcaacctttcaataaaaggaaatgcaaagcagcaaacatataaattatctcttaatttcgtttacatttcctgctcatatatatgttttttgtgtgcttga

SEQ ID NO: 371 - protein, 94 aa, Gossypium hirsutum
  REGION 4..53: note = Pfam Name: Myb_DNA-binding Pfam Description: Myb-like DNA-binding domain
  REGION 1..94: note = Ceres Clone ID no. 100068619
  REGION 1..94: note = Bit score of 130.0 for HMM based on sequences of Figure 7
  REGION 1..94: note = Functional Homolog Of SEQ ID NO. 323
MASGSNWTPKQNKLFENALAIYDKDTPDRWHKLARAVGGKTVEEVKLHYQNLVDDIKQIESGHVPLPPYKKAGGNQGYNNFMDDEEPRMRNLRL

SEQ ID NO: 372 - protein, 97 aa, Arabidopsis thaliana
  REGION 9..54: note = Pfam Name: Myb_DNA-binding Pfam Description: Myb-like DNA-binding domain
  REGION 1..97: note = Public GI ID no. 145327247
  REGION 1..97: note = Bit score of 153.0 for HMM based on sequences of Figure 7
  REGION 1..97: note = Functional Homolog Of SEQ ID NO. 323
MASNSRSSISPWTFSQNKMFERALAVYDKDTPDRWHNVAKAVGGKTVEEVKRHYDILVEDLINIETGRVPLPNYKTFESNSRSINDFDTRKMKNLKI

SEQ ID NO: 373 - DNA, 276 bp, Solanum lycopersicum
  misc_feature 1..276: note = Ceres Annot ID no. 8461532
  misc_feature 1..276: note = Encodes the peptide sequence at SEQ ID NO. 374
  source 1..276: mol_type = unassigned DNA
atggcctcgtggactgcaaggcaaaacaagaagttcgaagaggctttggcgttatatgacagagacacacctgatcgttggcataacattgcaaggtgtgtaggtggaaaatcagctgcagaagtgaagaggcattatgaagtacttgtgaaggatatcatgcaaatagaaaatggtcaagtacctttaccaaattacaaagccgcggctgaaaccaataacagatcaggttatgccaatgaacataggcttctgaagaacctgaagttacagtga

SEQ ID NO: 374 - protein, 91 aa, Solanum lycopersicum
  REGION 1..50: note = Pfam Name: Myb_DNA-binding Pfam Description: Myb-like DNA-binding domain
  REGION 1..91: note = Ceres Annot ID no. 8461532
  REGION 1..91: note = Bit score of 135.9 for HMM based on sequences of Figure 7
  REGION 1..91: note = Functional Homolog Of SEQ ID NO. 323
MASWTARQNKKFEEALALYDRDTPDRWHNIARCVGGKSAAEVKRHYEVLVKDIMQIENGQVPLPNYKAAAETNNRSGYANEHRLLKNLKLQ

SEQ ID NO: 375 - DNA, 776 bp, Panicum virgatum
  misc_feature 1..776: note = Ceres Clone ID no. 1722230
  misc_feature 1..776: note = Encodes the peptide sequence at SEQ ID NO. 376
  source 1..776: mol_type = unassigned DNA
atcagctcatcacaactcttgatctctagctagctaaagagataagcttcctctcttcctctcggtcgaaggagtgatcctctctcactctcaccaggagctcagctcgggtagctcaaggaggccagaagaagaaatggcgtcgctgtcgatgaccagcagctcggtgcgggcgcagtggacgaagaagcagaacaagctcttcgagcaggcgttggccgtgtacgacaaggacacccccgaccggtggcacaacatcgcccgcgccgtcggcggcaagtccgccgaggaggtcaggcgctactacgagctgctggaggaggatgtcaagcacatcgagtccggcaaggtgcccttccccgcctaccgctgccccggcggcgccggcgccggcgccctcggctacgaggccgacaggatgaagcatctgaagatctaggcgaacttcagagtatggtcgagaagaggctgcgcaggcacgtgtattagtgtatatatgattgggacagcatgcatgtccatgctactcctacgcaagtggtctggaagaagcaagaagaatcagatgagatgcatgcatgtcataattaattaattaattaattaattaataattagtatgggatgatcgagtagtatcctagcctgtcacgcgagatcgaccgacccatcgatctcccagcatgtgtccttcgtacccacgcgcgtatgtgtattatatcctagctgcatctgtgtaccataccaatcaagaaacatgaacttgatattgatgc

SEQ ID NO: 376 - protein, 100 aa, Panicum virgatum
  REGION 12..61: note = Pfam Name: Myb_DNA-binding Pfam Description: Myb-like DNA-binding domain
  REGION 1..100: note = Ceres Clone ID no. 1722230
  REGION 1..100: note = Bit score of 183.0 for HMM based on sequences of Figure 7
  REGION 1..100: note = Functional Homolog Of SEQ ID NO. 323
MASLSMTSSSVRAQWTKKQNKLFEQALAVYDKDTPDRWHNIARAVGGKSAEEVRRYYELLEEDVKHIESGKVPFPAYRCPGGAGAGALGYEADRMKHLKI

SEQ ID NO: 377 - DNA, 574 bp, Gossypium hirsutum
  misc_feature 1..574: note = Ceres Clone ID no. 1897493
  misc_feature 1..574: note = Encodes the peptide sequence at SEQ ID NO. 378
  source 1..574: mol_type = unassigned DNA
cttctacacctctttttcttttctttttttggcctcagaccctgaatttcgattgttaattatcactgttctgcaatggcgtcaggttcgaactggacgccaaagcaaaacaagttgttcgagaacgctttagctatctacgacaaggatacaccagaccggtggcacaagctagccagggctgttggggggaagaccgtggaggaagtgaagttgcattaccagaaccttttggatgacatcaagcagatagagtctgggcacgtgcctttgcccccttacaagaaagctggaggaacaaaggatacaacaatttcatggacgatgaagaaccaaggatgaggaatctcaggctttagtgaagtatgaaccagaaatagcctgtagaatatcaacctttcaataaaaggaaatgcaaagcagcaaacatataaattattgctcttaatttcgtttacatttcccgctcatatatatatatatgttttttgtgtgcttgaatgtaacaagcagccacaacgttcctatacttgcatgtatcaagtatgaaattatagcattggtgccttgtttt

SEQ ID NO: 378 - protein, 88 aa, Gossypium hirsutum
  REGION 4..53: note = Pfam Name: Myb_DNA-binding Pfam Description: Myb-like DNA-binding domain
  REGION 1..88: note = Ceres Clone ID no. 1897493
  REGION 1..88: note = Bit score of 124.3 for HMM based on sequences of Figure 7
  REGION 1..88: note = Functional Homolog Of SEQ ID NO. 323
MASGSNWTPKQNKLFENALAIYDKDTPDRWHKLARAVGGKTVEEVKLHYQNLLDDIKQIESGHVPLPPYKKAGGTKDTTISWTMKNQG

SEQ ID NO: 379 - DNA, 381 bp, Arabidopsis thaliana
  misc_feature 1..381: note = Ceres Annot ID no. 838426
  misc_feature 1..381: note = Encodes the peptide sequence at SEQ ID NO. 380
  source 1..381: mol_type = unassigned DNA
atggcgtcaaactcaagaagttcaatctcaccatggacgtttagtcaaaacaagatgttcgagagggccttggcagtttacgacaaggacacacccgaccgatggcacaatgtggcaaaagctgtcggagggaaaactgtagaagaagtgaagcgccactatgacattctcgtcgaggatctcatcaacatcgagactggtcgtgtccctttgcccaattacaagaccttcgaatctaactcaagaagcatcaatgactttgacacaaggtatataactaaatatctatatatgatgctctcgatatattttgataatcattctagtgattttgagaaattctctcaaaaagttcttgtaagttatatttctttggtttaa

SEQ ID NO: 380 - protein, 126 aa, Arabidopsis thaliana
  REGION 9..54: note = Pfam Name: Myb_DNA-binding Pfam Description: Myb-like DNA-binding domain
  REGION 1..126: note = Ceres Annot ID no. 838426
  REGION 1..126: note = Bit score of 147.8 for HMM based on sequences of Figure 7
  REGION 1..126: note = Functional Homolog Of SEQ ID NO. 323
MASNSRSSISPWTFSQNKMFERALAVYDKDTPDRWHNVAKAVGGKTVEEVKRHYDILVEDLINIETGRVPLPNYKTFESNSRSINDFDTRYITKYLYMMLSIYFDNHSSDFEKFSQKVLVSYISLV

SEQ ID NO: 381 - DNA, 306 bp, Arabidopsis thaliana
  misc_feature 1..306: note = Ceres Annot ID no. 827713
  misc_feature 1..306: note = Encodes the peptide sequence at SEQ ID NO. 382
  source 1..306: mol_type = unassigned DNA
atggcatcaggctcaatgtcttcttatggctctggctcatggactgttaagcagaacaaagcctttgagcgtgctctagcagtctatgaccaagacactccggaccgttggcacaatgttgctagagctgttggtggtaaaacaccagaagaagctaagagacagtatgaccttctagttcgtgacatcgaaagcatcgagaatggtcacgtgccattccctgactacaagactactacaggaaacagcaacagaggcaggctgcgtgatgaggaaaagaggatgagaagcatgaagctgcagtga

SEQ ID NO: 382 - protein, 101 aa, Arabidopsis thaliana
  REGION 11..60: note = Pfam Name: Myb_DNA-binding Pfam Description: Myb-like DNA-binding domain
  REGION 1..101: note = Ceres Annot ID no. 827713
  REGION 1..101: note = Bit score of 171.4 for HMM based on sequences of Figure 7
  REGION 1..101: note = Functional Homolog Of SEQ ID NO. 323
MASGSMSSYGSGSWTVKQNKAFERALAVYDQDTPDRWHNVARAVGGKTPEEAKRQYDLLVRDIESIENGHVPFPDYKTTTGNSNRGRLRDEEKRMRSMKLQ

SEQ ID NO: 383 - DNA, 776 bp, Panicum virgatum
  misc_feature 1..776: note = Ceres Clone ID no. 1763593
  misc_feature 1..776: note = Encodes the peptide sequence at SEQ ID NO. 384
  source 1..776: mol_type = unassigned DNA
atcagctcatcacagctctcttgatctctagctagagataagcaagcttcctcttcctctcggtcgagcgagcgagtgatcctctctcactcccaccaggagctcgggtaactcaaggaggccagaagaagaaatggcgtcgctgtcgatgaccagtagctcggtgcgggcgcagtggacgaagaagcagaacaagctgttcgagcaggctctggccgtgtacgacaaggacacgcccgaccggtggcacaacatcgcccgcgccgtcggcggcaagtccgccgaggaggtcaggcgctactacgagctgctggaggaggacgtcaagcacatcgagtccggcaaggtgcccttccccgcctaccgctgccccggcggcgccggcgccggcgccggcgccctcggctacgaggccgacaggatgaagcatctgaagatctaggcgaacttcagaggatgatgatggtcgagaagaggctgctcagtgctcacgcacgtgtatatatgattgggacagcatgcatgtccatgctactcttagcaagtggtctggagaagcaagaagaatcagatgagatgcatgcatgttacaatcaattaataatttgtatggggtgatcgagtagtatcctagcctgtcacgcacgcgagatcgaccgacccatcgatctcccagcatgtgtccttcgtacccacgcgtatctgtattatatcctagctgcatctgtgtaccataccaatcaagaaacatgaacttgatattgatgcatttctac

SEQ ID NO: 384 - protein, 102 aa, Panicum virgatum
  REGION 12..61: note = Pfam Name: Myb_DNA-binding Pfam Description: Myb-like DNA-binding domain
  REGION 1..102: note = Ceres Clone ID no. 1763593
  REGION 1..102: note = Bit score of 181.2 for HMM based on sequences of Figure 7
  REGION 1..102: note = Functional Homolog Of SEQ ID NO. 323
MASLSMTSSSVRAQWTKKQNKLFEQALAVYDKDTPDRWHNIARAVGGKSAEEVRRYYELLEEDVKHIESGKVPFPAYRCPGGAGAGAGALGYEADRMKHLKI

SEQ ID NO: 385 - DNA, 508 bp, Arabidopsis thaliana
  misc_feature 1..508: note = Ceres Clone ID no. 143475
  misc_feature 1..508: note = Encodes the peptide sequence at SEQ ID NO. 386
  source 1..508: mol_type = unassigned DNA
aaaatcaagtcctttttcatcaagtcatacatacatcttccttcttctttttttctccctcccaagaagcagatcttgtactctcgatatacaaacttattcgtgatatggcttccaactcaatgagctctagcgcttcttggacacgtaaggagaacaaattatttgaaagggcgttggctacatatgaccaggacactcctgaccgttggcataacgttgcaagagccgttggcggcaaatcagctgaagaagtaaggcgacactacgagctcctcattagggatgtcaatgacattgagtcagggcgttatccacatcccaattaccgttcaaatggaaacaatcactgaaagcattgaaggaactccaaaaggctctactgaagtggacatggttccaaaaccattcacaaagcacatctaagcaaagatatctaaatgtatttacttgtttttgtgttacgaatatgtaagaattatctaaatcaatcaatgtggtttcatat

SEQ ID NO: 386 - protein, 81 aa, Arabidopsis thaliana
  REGION 9..58: note = Pfam Name: Myb_DNA-binding Pfam Description: Myb-like DNA-binding domain
  REGION 1..81: note = Ceres Clone ID no. 143475
  REGION 1..81: note = Bit score of 140.1 for HMM based on sequences of Figure 7
  REGION 1..81: note = Functional Homolog Of SEQ ID NO. 323
MASNSMSSSASWTRKENKLFERALATYDQDTPDRWHNVARAVGGKSAEEVRRHYELLIRDVNDIESGRYPHPNYRSNGNNH

SEQ ID NO: 387 - DNA, 237 bp, Solanum lycopersicum
  misc_feature 1..237: note = Ceres Annot ID no. 8456508
  misc_feature 1..237: note = Encodes the peptide sequence at SEQ ID NO. 388
  source 1..237: mol_type = unassigned DNA
atggcatcaaattcactcactgcttggactccaagagaaaacaagaaattcgagcaggcactcgcggtctacgataaggacacatctgatcgatggcaaaacattgctagatacgttggtgggaaatcagttgaagaagttaaacatcactatgctatacttgtagaggatcttaagcacattgaatctggtgacgtcccattcccaaaatacaagtcaggtggaaagtctcgttaa

SEQ ID NO: 388 - protein, 78 aa, Solanum lycopersicum
  REGION 6..55: note = Pfam Name: Myb_DNA-binding Pfam Description: Myb-like DNA-binding domain
  REGION 1..78: note = Ceres Annot ID no. 8456508
  REGION 1..78: note = Bit score of 124.5 for HMM based on sequences of Figure 7
  REGION 1..78: note = Functional Homolog Of SEQ ID NO. 323
MASNSLTAWTPRENKKFEQALAVYDKDTSDRWQNIARYVGGKSVEEVKHHYAILVEDLKHIESGDVPFPKYKSGGKSR

SEQ ID NO: 389 - DNA, 505 bp, Gossypium hirsutum
  misc_feature 1..505: note = Ceres Clone ID no. 100002959
  misc_feature 1..505: note = Encodes the peptide sequence at SEQ ID NO. 390
  unsure 24: note = n is a, c, t, g, unknown, or other
  source 1..505: mol_type = unassigned DNA
cattccaaattttgattattttcnttcttttttattttttttatttaaaatttgaaactgctaacattattacattttcattagcctcaagagaagaaaaaaaaatgtcatcgaattcaatgtctgcttcatggacagccaagcaaaacaaagatttcgaaagggctttagctgtttacgacaaggacacaccagatcgttggtacaatgttgctaaagctgtgggagggaaaactgttgaggaagtgaagaagcactatgagcttcttctggaagatgttagacacatcgagtcgggtcgggttcctttccccgactattggaccgttaccgggaatcgtcaagcatgaaagattccgaagctcaaatgaagaagaaaaaatggtggacttgcatggatctcacccttatatgtgtgtgtgtgtgtgtggcagtaattgtagtacttaagaatagccataaatgtatttaggaagaggaagaagagcttaatgggtgatcattg

SEQ ID NO: 390 - protein, 81 aa, Gossypium hirsutum
  REGION 7..56: note = Pfam Name: Myb_DNA-binding Pfam Description: Myb-like DNA-binding domain
  REGION 1..81: note = Ceres Clone ID no. 100002959
  REGION 1..81: note = Bit score of 141.4 for HMM based on sequences of Figure 7
  REGION 1..81: note = Functional Homolog Of SEQ ID NO. 323
MSSNSMSASWTAKQNKDFERALAVYDKDTPDRWYNVAKAVGGKTVEEVKKHYELLLEDVRHIESGRVPFPDYWTVTGNRQA

SEQ ID NO: 391 - protein, 93 aa, Antirrhinum majus
  REGION 8..57: note = Pfam Name: Myb_DNA-binding Pfam Description: Myb-like DNA-binding domain
  REGION 1..93: note = Public GI ID no. 118137433
  REGION 1..93: note = Bit score of 157.9 for HMM based on sequences of Figure 7
  REGION 1..93: note = Functional Homolog Of SEQ ID NO. 323
MASTRGSGRPWSAKENKAFERALAVYDKDTPDRWANVARAVEGRTPEEVKKHYEILVEDIKYIESGKVPFPNYRTTGGNMKTDEKRFRNLKIR

SEQ ID NO: 392 - DNA, 747 bp, Zea mays
  misc_feature 1..747: note = Ceres Clone ID no. 1523182
  misc_feature 1..747: note = Encodes the peptide sequence at SEQ ID NO. 393
  source 1..747: mol_type = unassigned DNA
gctcagcatacacaacatcatcatcatcatcttctcgctagtcgagcgagcccttatagttaattaagctagtcgatcgatccaagagaagaagaagcagcagacaggaatggcgtcgctctcgatgacgacgagcgcagcggcccgcgcgcagtggacgcctaggcagaacaagctgttcgagcaggcgctggcggtgtacgacaaggacacgcccgaccgctggcacaacatcgcctgcgccgtcggcggcgggaagtccgcggacgacgtcaggcgctactacgagctgctggaggaggacgtcggccacatcgagtccggcaaggtgcccttccccgcctaccgctaccccgccggctacggggccgccgacaggctgaaacagctgaagatctaggaggtcaattgaacatataggacgaacgatcgatgatccagaagatgcaaacatgtgtgtatataggattaatgggacagtatcagtatgcatgcaatggtccatgctgcaagtgcatgcaagtggtgtgtgaaagcaagaatcagattagatgcatgcatatgcatgtgttaatttagtagtaataattgtagtatgggatgagtcctatactagccagtcacgcgcgatcgaccgaccgacccatcgatctccaatgcttctgttccctctccctcctacttgtccacttgtgtgtatatataaatattatgtatttttattattatatatactctacctgttct

SEQ ID NO: 393 - protein, 96 aa, Zea mays
  REGION 13..63: note = Pfam Name: Myb_DNA-binding Pfam Description: Myb-like DNA-binding domain
  REGION 1..96: note = Ceres Clone ID no. 1523182
  REGION 1..96: note = Bit score of 154.2 for HMM based on sequences of Figure 7
  REGION 1..96: note = Functional Homolog Of SEQ ID NO. 323
MASLSMTTSAAARAQWTPRQNKLFEQALAVYDKDTPDRWHNIACAVGGGKSADDVRRYYELLEEDVGHIESGKVPFPAYRYPAGYGAADRLKQLKI

SEQ ID NO: 394 - DNA, 752 bp, Panicum virgatum
  misc_feature 1..752: note = Ceres Clone ID no. 1761808
  misc_feature 1..752: note = Encodes the peptide sequence at SEQ ID NO. 395
  source 1..752: mol_type = unassigned DNA
atcagctcatcacagctcttgatctctagctagctagagagataagcttcctctcttcctctcggtcgagggagtgatcctctctcactctcaccaggagctcagctcgggtagctcaaggaggccagaagaagaaatggcgtcgctgtcgatgaccagcagctcggtgcgggcgcagaggacgaagaagcagaacaagctcttcgagcaggcgttggccgtgtacgacaaggacacccccgaccggtggcacaacatcgcccgcgccgtcggcggcaagtccgccgaggaggtcaggcgctactacgagctgctggaggaggatgtcaagcacatcgagtccggcaaggtgcccctccccgcctaccgctgccccggcggcgccggcgccggcgccctcggctacgaggccgacaggatgaagcatctgaagatctaggcgaacttcaaaggatggtcgagaagaggctgcgcaggcacgtgtatatatgattgggatagcatgcatgtccatgctactcctacgcaagtggtctggaagaagcaagaagaatcagatgagatgcatgcatgtcataattaattaataattagtatgggatgatcgagtagtatcctagcctgtcacgcgagatcgaccgacccatcgatctcccagcatgtgtccttcgtacccacgcgcgtatgtgtattatatcctagctgcatctgtgtaccataccaatcaagaaacatgaacttgatattgatgc

SEQ ID NO: 395 - protein, 100 aa, Panicum virgatum
  REGION 9..58: note = Pfam Name: Myb_DNA-binding Pfam Description: Myb-like DNA-binding domain
  REGION 1..100: note = Ceres Clone ID no. 1761808
  REGION 1..100: note = Bit score of 174.9 for HMM based on sequences of Figure 7
  REGION 1..100: note = Functional Homolog Of SEQ ID NO. 323
MASLSMTSSSVRAQRTKKQNKLFEQALAVYDKDTPDRWHNIARAVGGKSAEEVRRYYELLEEDVKHIESGKVPLPAYRCPGGAGAGALGYEADRMKHLKI

SEQ ID NO: 396 - DNA, 517 bp, Brassica napus
  misc_feature 1..517: note = Ceres Clone ID no. 1069222
  misc_feature 1..517: note = Encodes the peptide sequence at SEQ ID NO. 397
  source 1..517: mol_type = unassigned DNA
aaaatcaactcatacatacatctttcttcttttactccctccaaagaaaccagatttccattttcaaaacactcttttcgatcttttactaaatggcttccaactccatgagttctaacacttcttggacgcgtaaggagaacaaactatttgaaagggctttggctatatatgagcaggacactcctgaccgatggcataacgttgctagagcagttggtgggaaatcggctgaagaagtaaggagacactacgagctcctcgtaagggatgtcaatgacattgagtcagggcgttatccgcatcctacttaccgttcaaatggaaactgaaagcatttaagctactcaaaaaggttcctctgaaaccaacatgattcgaaaaccagaaacaaacagagaggatctaaacaaagatatatcaaatgtatttacgtctattgtgttatatgtatacgactatgtaagaattttatgctttcatgctaatattaatgaatcaacgtgagtttcacatg

SEQ ID NO: 397 - protein, 79 aa, Brassica napus
  REGION 9..58: note = Pfam Name: Myb_DNA-binding Pfam Description: Myb-like DNA-binding domain
  REGION 1..79: note = Ceres Clone ID no. 1069222
  REGION 1..79: note = Bit score of 129.8 for HMM based on sequences of Figure 7
  REGION 1..79: note = Functional Homolog Of SEQ ID NO. 323
MASNSMSSNTSWTRKENKLFERALAIYEQDTPDRWHNVARAVGGKSAEEVRRHYELLVRDVNDIESGRYPHPTYRSNGN

SEQ ID NO: 398 - DNA, 267 bp, Sorghum bicolor
  misc_feature 1..267: note = Ceres Annot ID no. 8734209
  misc_feature 1..267: note = Encodes the peptide sequence at SEQ ID NO. 399
  source 1..267: mol_type = unassigned DNA
atggcgtcgatgcagtcgatgacgagcgcagcggcgcgcgcgcagtggacgccgaagcagaacaagctgttcgagcaggcgctggccgtttacgacaaggacacgccggaccggtggcacaacatcgcccgcgccgtcggcggcggcaagtccgccgaggacgtcaggcgctactacgacctgctggaggaggacgtcggccacatcgagtccggcaaggtgcccttcccggcctaccgctgcgccaccggctacggggccgcctga

SEQ ID NO: 399 - protein, 88 aa, Sorghum bicolor
  REGION 13..63: note = Pfam Name: Myb_DNA-binding Pfam Description: Myb-like DNA-binding domain
  REGION 1..88: note = Ceres Annot ID no. 8734209
  REGION 1..88: note = Bit score of 144.2 for HMM based on sequences of Figure 7
  REGION 1..88: note = Functional Homolog Of SEQ ID NO. 323
MASMQSMTSAAARAQWTPKQNKLFEQALAVYDKDTPDRWHNIARAVGGGKSAEDVRRYYDLLEEDVGHIESGKVPFPAYRCATGYGAA

SEQ ID NO: 400 - DNA, 282 bp, Solanum lycopersicum
  misc_feature 1..282: note = Ceres Annot ID no. 8461540
  misc_feature 1..282: note = Encodes the peptide sequence at SEQ ID NO. 401
  source 1..282: mol_type = unassigned DNA
atggccacaaattcaacgtggagtcatcatcaaaacaagttatttgagaatgcattggccatttacgacatcgatacaccagatcgatggcgtaaattagccaatgcagttggtggaaaaacagaagaagaagtgaaaaatcactatgaaaaacttgttgaagatattaagcgtatcgaatctggaaatattccattacctaattataatggtggtcgtaataataaaggctacaatttcatggatgaagaacaaaggctgaagtatttgaagctccaatga

SEQ ID NO: 401 - protein, 93 aa, Solanum lycopersicum
  REGION 4..53: note = Pfam Name: Myb_DNA-binding Pfam Description: Myb-like DNA-binding domain
  REGION 1..93: note = Ceres Annot ID no. 8461540
  REGION 1..93: note = Bit score of 121.3 for HMM based on sequences of Figure 7
  REGION 1..93: note = Functional Homolog Of SEQ ID NO. 323
MATNSTWSHHQNKLFENALAIYDIDTPDRWRKLANAVGGKTEEEVKNHYEKLVEDIKRIESGNIPLPNYNGGRNNKGYNFMDEEQRLKYLKLQ

SEQ ID NO: 402 - DNA, 408 bp, Brassica napus
  misc_feature 1..408: note = Ceres Clone ID no. 1086604
  misc_feature 1..408: note = Encodes the peptide sequence at SEQ ID NO. 403
  source 1..408: mol_type = unassigned DNA
gcaaatcaacattttcatcgttaatacaaaccaacttctctaacgtcgctcttttgttattctacattttcacactaatggcttccaactcaattatcagcacttcccggagctctacctcgtcatggacagcgaaacaggacaaacagttcgaaatggctttggctaagttcgagaaggacactcctgaccgatggcaaaatgtggcaagagtagttggtggaaaatcagctgaagaggtaaaaagacgctatgaattgctcgttagagatgttaatgacattgaatcaggacgttacgacccacaacctaggtaccgtaacactaattgaagccattgagattctttgtgagctccggaaaaaataactatgtgcctttaaactctattgagatggagacattaag

SEQ ID NO: 403 - protein, 84 aa, Brassica napus
  REGION 14..63: note = Pfam Name: Myb_DNA-binding Pfam Description: Myb-like DNA-binding domain
  REGION 1..84: note = Ceres Clone ID no. 1086604
  REGION 1..84: note = Bit score of 105.3 for HMM based on sequences of Figure 7
  REGION 1..84: note = Functional Homolog Of SEQ ID NO. 323
MASNSIISTSRSSTSSWTAKQDKQFEMALAKFEKDTPDRWQNVARVVGGKSAEEVKRRYELLVRDVNDIESGRYDPQPRYRNTN

SEQ ID NO: 404 - DNA, 481 bp, Arabidopsis thaliana
  misc_feature 1..481: note = Ceres Clone ID no. 41695
  misc_feature 1..481: note = Encodes the peptide sequence at SEQ ID NO. 405
  source 1..481: mol_type = unassigned DNA
aattcaagtcatctctatccgtcaacaatacaaaccaaccttctcaattcctctcttttcatccacattttcactagctaatggcttctagttcaatgagcacctcatcatggacagctagagaggacaagcaattcgaaatggcgttggcgaaattcgacaaggacactcctgaccgttggcaaaaaattgcaagggcagttggtgggaaatcaactgaagaagtaaagcgacactatgaattgctccttagggatgtgaatgacattgagtcaggacgctatccacaacctaggtaccgtaacactaattgaagccattaataaaatgcctttctatcaagaagaggacatttgagagaatctataaagaactaagaatttcgatgtatttcttatattctatttgctttctttttttgttttttttttaatttctgtttggttttcagatatataataatctctctcaatatccatcc

SEQ ID NO: 405 - protein, 77 aa, Arabidopsis thaliana
  REGION 8..57: note = Pfam Name: Myb_DNA-binding Pfam Description: Myb-like DNA-binding domain
  REGION 1..77: note = Ceres Clone ID no. 41695
  REGION 1..77: note = Bit score of 112.6 for HMM based on sequences of Figure 7
  REGION 1..77: note = Functional Homolog Of SEQ ID NO. 323
MASSSMSTSSWTAREDKQFEMALAKFDKDTPDRWQKIARAVGGKSTEEVKRHYELLLRDVNDIESGRYPQPRYRNTN

SEQ ID NO: 406 - protein, 83 aa, Antirrhinum majus
  REGION 13..62: note = Pfam Name: Myb_DNA-binding Pfam Description: Myb-like DNA-binding domain
  REGION 1..83: note = Public GI ID no. 112292440
  REGION 1..83: note = Bit score of 109.3 for HMM based on sequences of Figure 7
  REGION 1..83: note = Functional Homolog Of SEQ ID NO. 323
MASSSMTSSRGSSSLWTPKQNRQFEEALTMFDKDTPDRWQNIARRIDGKSAEQVRRYYEELLKDITRIENDQVPIPNYKTNNR

SEQ ID NO: 407 - protein, 78 aa, Arabidopsis thaliana
  REGION 8..57: note = Pfam Name: Myb_DNA-binding Pfam Description: Myb-like DNA-binding domain
  REGION 1..78: note = Public GI ID no. 116830269
  REGION 1..78: note = Bit score of 117.6 for HMM based on sequences of Figure 7
  REGION 1..78: note = Functional Homolog Of SEQ ID NO. 323
MASSSMSTSSWTAREDKQFEMALAKFDKDTPDRWQKIARAVGGKSTEEVKRHYELLLRDVNDIESGRYPQPRYRNTNG

SEQ ID NO: 408 - DNA, 663 bp, Panicum virgatum
  misc_feature 1..663: note = Ceres Clone ID no. 1775942
  misc_feature 1..663: note = Encodes the peptide sequence at SEQ ID NO. 409
  source 1..663: mol_type = unassigned DNA
acaagccacacaggccaagcgagcgatcaagagccagccatcagctctcgcgcgctcagtttagctagctgcttcttctgagagaaattaaagatacatatagctagtaggagatagatggcgtcgatgtcaatgagatcgtcgagggcgcagtggacgaagaagcaggacaagctgttcgagcaggcgctggcggtgtacgacaaggacacgccggaccggtggcacaacatcgcgcgcgccgtggggggcaagtcggcggaggaggtcaggcgctactacgagctgctggaagaggacgtcaagcgcatcgaggccggcaaggtgcccttccccgtctataggtgcccgccggcgccgcccccaattactagctaggcccacaggctgaagcaccagaagatctacgtacgtacttcggcaacaatcatgacatacagtgggtttggctacaaaacagtaactcaaccaagtggccggagcatccgtgcacatatatgaataactaccgctacctctagttaccgcagatcaatcgatctcccatgtatgtagtagtatacgtgttcatctggattctcaatttctcatgtaagatcatctctgtatttgtattatgtatcttgagaaaaagtgaagtaaaaaagtccttcatttcccctt

SEQ ID NO: 409 - protein, 86 aa, Panicum virgatum
  REGION 10..59: note = Pfam Name: Myb_DNA-binding Pfam Description: Myb-like DNA-binding domain
  REGION 1..86: note = Ceres Clone ID no. 1775942
  REGION 1..86: note = Bit score of 143.9 for HMM based on sequences of Figure 7
  REGION 1..86: note = Functional Homolog Of SEQ ID NO. 323
MASMSMRSSRAQWTKKQDKLFEQALAVYDKDTPDRWHNIARAVGGKSAEEVRRYYELLEEDVKRIEAGKVPFPVYRCPPAPPPITS

SEQ ID NO: 410 - DNA, 563 bp, Musa acuminata
  misc_feature 1..563: note = Ceres Clone ID no. 1723374
  misc_feature 1..563: note = Encodes the peptide sequence at SEQ ID NO. 411
  source 1..563: mol_type = unassigned DNA
acacagatcagctagctccaccagagaagcaaagcaaacccttcttccctgagatggcatccggttcgatgagctcctcctggaccgcgaaggagaacaagatgttcgagaaggcactggcggtgtacgacagggacacccccgaccgctggcacaagatcgcccgggccatcggcgggaagacggcggacgaagtgaagcgctactacgacctgctcgtggaggacgtgcgccgcatcgaggctggccaaatgccgtacgccaattaccggtcctctaatggcagaggttgagagtgtttggagctcaaccggagaacgaacaagaagcaaggagcatttcactgttctggatatcagttaccacaatcttaattataggactatatgaactctacatgtctgtggacttacaagtagtttcttctatgcagtcttctttctcccttctatcgtgtactcccagatatatcgaagactgccatcataaacatatatatggctagtcttcttgtaatcggttatcttgcttgctaatgaacgcttagtattgttctattctag

SEQ ID NO: 411 - protein, 79 aa, Musa acuminata
  REGION 7..56: note = Pfam Name: Myb_DNA-binding Pfam Description: Myb-like DNA-binding domain
  REGION 1..79: note = Ceres Clone ID no. 1723374
  REGION 1..79: note = Bit score of 122.5 for HMM based on sequences of Figure 7
  REGION 1..79: note = Functional Homolog Of SEQ ID NO. 323
MASGSMSSSWTAKENKMFEKALAVYDRDTPDRWHKIARAIGGKTADEVKRYYDLLVEDVRRIEAGQMPYANYRSSNGRG

SEQ ID NO: 412 - DNA, 285 bp, Populus balsamifera
  misc_feature 1..285: note = Ceres Annot ID no. 1457230
  misc_feature 1..285: note = Encodes the peptide sequence at SEQ ID NO. 413
  source 1..285: mol_type = unassigned DNA; note = Populus balsamifera subsp. trichocarpa
atggcatcaagttctttcccgcagcccagcacaaattggtcagccgaacaaaacaagttgttcgaaaatgctcttgcgatatatgataaggacactccggatcgttgggggaaaatagccaagattgtcaaaggaacaaccgaggatgaagtaaagcagcaatacgagatccttcttgatgatataaagagcattgagtcggacaaagtcccgctaccgaattacaagaacgaaggaagcagcaaggaaaacatcatcggtaatgaagaggagaggctgcagtaa

SEQ ID NO: 413 - protein, 94 aa, Populus balsamifera
  REGION 10..59: note = Pfam Name: Myb_DNA-binding Pfam Description: Myb-like DNA-binding domain
  REGION 1..94: note = Ceres Annot ID no. 1457230
  REGION 1..94: note = Bit score of 124.4 for HMM based on sequences of Figure 7
  REGION 1..94: note = Functional Homolog Of SEQ ID NO. 323
  source 1..94: note = Populus balsamifera subsp. trichocarpa
MASSSFPQPSTNWSAEQNKLFENALAIYDKDTPDRWGKIAKIVKGTTEDEVKQQYEILLDDIKSIESDKVPLPNYKNEGSSKENIIGNEEERLQ

SEQ ID NO: 414 - DNA, 270 bp, Sorghum bicolor
  misc_feature 1..270: note = Ceres Annot ID no. 8667653
  misc_feature 1..270: note = Encodes the peptide sequence at SEQ ID NO. 415
  source 1..270: mol_type = unassigned DNA
atgtcgctgagctcgacgagggcgcagtggacggcgaagcagaacaagctgttcgagcaggcgctggcggtgtacgacagggacacgccggaccggtggcacaacatcgcgcgcgccgtcgggggcggcaagtcggcggacgaggtcaggcgctactacgagctgctggtgaaggacgtggagcacatcgaggccggcaaggtgcccttcccggcctacaggtgccccgccggctacgacgccgacaggctgaagcacctgaagatctag

SEQ ID NO: 415 - protein, 89 aa, Sorghum bicolor
  REGION 7..57: note = Pfam Name: Myb_DNA-binding Pfam Description: Myb-like DNA-binding domain
  REGION 1..89: note = Ceres Annot ID no. 8667653
  REGION 1..89: note = Bit score of 152.6 for HMM based on sequences of Figure 7
  REGION 1..89: note = Functional Homolog Of SEQ ID NO. 323
MSLSSTRAQWTAKQNKLFEQALAVYDRDTPDRWHNIARAVGGGKSADEVRRYYELLVKDVEHIEAGKVPFPAYRCPAGYDADRLKHLKI

SEQ ID NO: 416 - protein, 90 aa, Oryza sativa
  REGION 6..56: note = Pfam Name: Myb_DNA-binding Pfam Description: Myb-like DNA-binding domain
  REGION 1..90: note = Public GI ID no. 115465643
  REGION 1..90: note = Bit score of 143.4 for HMM based on sequences of Figure 7
  REGION 1..90: note = Functional Homolog Of SEQ ID NO. 323
  source 1..90: note = Oryza sativa subsp. japonica
MAQQARAQWPQKQNKLFEQALAVYDKETPDRWHNIARAVGGGKSAEDVKRYYEMLEEDIKHIESGKVPFPAYRCPAAAGYQAERLKHLKI

SEQ ID NO: 417 - protein, 126 aa, Oryza sativa
  REGION 24..74: note = Pfam Name: Myb_DNA-binding Pfam Description: Myb-like DNA-binding domain
  REGION 1..126: note = Public GI ID no. 5091605
  REGION 1..126: note = Bit score of 130.9 for HMM based on sequences of Figure 7
  REGION 1..126: note = Functional Homolog Of SEQ ID NO. 323
  source 1..126: note = Oryza sativa subsp. japonica
MASAAGSKQQQAMMSLPSSRGGGGGGWTQRQNKQFECALAVYDKETPDRWHNIARYMGGAKSADEVRRHFDHLVEDVSRIESGRVPFPRYSSSSSSRGADDGNRLLTVFHLSSVPRTRNANHKFNT

SEQ ID NO: 418 - protein, 111 aa, Oryza sativa
  REGION 24..74: note = Pfam Name: Myb_DNA-binding Pfam Description: Myb-like DNA-binding domain
  REGION 1..111: note = Public GI ID no. 125553458
  REGION 1..111: note = Bit score of 130.2 for HMM based on sequences of Figure 7
  REGION 1..111: note = Functional Homolog Of SEQ ID NO. 323
  source 1..111: note = Oryza sativa subsp. indica
MASAAGSKQQQAMMSLPSSRGGGGGGWTQRQNKQFECALAVYDKETPDRWHNIARYMGGAKSADEVRRHFDHLVEDVARIESGRVPFPRYSSSSSSRGADDGNRSRYLKYQ

SEQ ID NO: 419 - DNA, 255 bp, Populus balsamifera
  misc_feature 1..255: note = Ceres Annot ID no. 1510435
  misc_feature 1..255: note = Encodes the peptide sequence at SEQ ID NO. 420
  source 1..255: mol_type = unassigned DNA; note = Populus balsamifera subsp. trichocarpa
atggcatcaagttctttcccgcagcccagcacaaattggtcagccgaacaaaacaagttgttcgaaaatgctcttgcgatatatgataaggacactccggatcgttgggggaaaatagccaagattgtcaaaggaacaaccgaggatgaagtaaagcagcaatacgagatccttcttgatgatataaagagcattgagtcggacaaagtcccgctaccgaattacaagaacgaaggaagcagctgcagtaactaa

SEQ ID NO: 420 - protein, 84 aa, Populus balsamifera
  REGION 10..59: note = Pfam Name: Myb_DNA-binding Pfam Description: Myb-like DNA-binding domain
  REGION 1..84: note = Ceres Annot ID no. 1510435
  REGION 1..84: note = Bit score of 111.1 for HMM based on sequences of Figure 7
  REGION 1..84: note = Functional Homolog Of SEQ ID NO. 323
  source 1..84: note = Populus balsamifera subsp. trichocarpa
MASSSFPQPSTNWSAEQNKLFENALAIYDKDTPDRWGKIAKIVKGTTEDEVKQQYEILLDDIKSIESDKVPLPNYKNEGSSCSN

SEQ ID NO: 421 - protein, 85 aa, Oryza sativa
  REGION 11..60: note = Pfam Name: Myb_DNA-binding Pfam Description: Myb-like DNA-binding domain
  REGION 1..85: note = Public GI ID no. 115438765
  REGION 1..85: note = Bit score of 125.0 for HMM based on sequences of Figure 7
  REGION 1..85: note = Functional Homolog Of SEQ ID NO. 323
  source 1..85: note = Oryza sativa subsp. japonica
MASMSVSSSRAPQWTARQNEQFERALAVYDRDTPERWHNIARAVAGKSADEVKLYYDLLVEDVKRIETGKVPFPAYRCPQPAIAG

SEQ ID NO: 422 - protein, 90 aa, Antirrhinum majus
  REGION 8..57: note = Pfam Name: Myb_DNA-binding Pfam Description: Myb-like DNA-binding domain
  REGION 1..90: note = Public GI ID no. 112292438
  REGION 1..90: note = Bit score of 121.1 for HMM based on sequences of Figure 7
  REGION 1..90: note = Functional Homolog Of SEQ ID NO. 323
MASSSMTSSSWTQKQNKQFEEALAMYGNDTPDCWQNIARKVGGKSAEEIRRHYEVLVKEIMKIETDQVPIPNYNKVKGSNSRGYGNYRGF

SEQ ID NO: 423 - DNA, 330 bp, Oryza sativa
  misc_feature 1..330: note = Ceres Annot ID no. 1770841
  misc_feature 1..330: note = Encodes the peptide sequence at SEQ ID NO. 424
  source 1..330: mol_type = unassigned DNA
atgagttcatcatggacgacgaagcagaacaagctgttcgagagggcgctggcgacatacgacaaagacacgccgggccgctggcagaacgtggcgcgggcagtgggtggtggaaagacggccgaggaggtgaagaggcactacgacaagctgcttcaagacctgcaccacattgagtcggcaggccgtcagggttcccaatacggcggcagcagcagcagcaaatccaaaggtggcagcagcagcggggagcagagatatcggaacagagactggaagcagcaaccagggctccatagtggtgccgtgaaaagagcctctcagtattag

SEQ ID NO: 424 - protein, 109 aa, Oryza sativa
  REGION 2..52: note = Pfam Name: Myb_DNA-binding Pfam Description: Myb-like DNA-binding domain
  REGION 1..109: note = Ceres Annot ID no. 1770841
  REGION 1..109: note = Bit score of 105.1 for HMM based on sequences of Figure 7
  REGION 1..109: note = Functional Homolog Of SEQ ID NO. 323
MSSSWTTKQNKLFERALATYDKDTPGRWQNVARAVGGGKTAEEVKRHYDKLLQDLHHIESAGRQGSQYGGSSSSKSKGGSSSGEQRYRNRDWKQQPGLHSGAVKRASQY

SEQ ID NO: 425 - DNA, 2145 bp, Arabidopsis thaliana
  misc_feature 1..2145: note = Ceres Annot ID no. 878355
  misc_feature 1..2145: note = Encodes the peptide sequence at SEQ ID NO. 426
  source 1..2145: mol_type = unassigned DNA
actctcaatatcactattaaatatctttctcttttcacttcttcactttcctcgattcctgagttttcgatccttttgttctctaaccaccggtttcctctttaaccggtctctggataatcatcataatcattaggatcatcaagataaggaatctttttgagtatatctctacaccaaatcgaatctatggatcaaaaagttagacagtttgaggtttgcactcaagacggtagcgttgatcgtcacggcaatccagctatccgagctaataccggcaaatggctcactgctattctcattctagtgaatcaaggactagctacgcttgcgttcttcggtgtaggagtgaatttggttctgtttctgactcgagtgatgggacaagacaatgcagaagcggctaataatgttagtaaatggacaggaactgtctatatcttctctttgcttggtgctttcctcagtgactcttattggggacgttacaagacttgtgctatctttcaagcaagtttcgttgcagggttgatgatgttatctttatctactggtgcgttattgcttgaaccaagtggttgtggagttgaagattcgccgtgtaagcctcattcgacgtttaagacggttctgttttatctgtcggtgtatctaatcgcgttagggtatggtggttatcagccgaacatagctacttttggagctgatcagtttgatgcggaggattccgttgaaggacactcgaaaatcgcgtttttcagttacttttacttggctctgaatcttggatcgctcttctcaaatactgtcttgggttactttgaggatcaaggggaatggccgcttggattttgggcgtctgctggctctgcttttgcggggttagtgcttttcttgattggcacgccaaagtaccgacactttacgcctagagagagtccttggtctagattctgccaagtgttggttgctgcaacaagaaaggctaagattgatgtgcaccatgaagagttgaatctctatgattctgagactcaatacactggagataagaagattcttcataccaaaggcttcagattcttggatagagctgctattgttacacctgatgatgaggctgagaaagtagagagcggatcgaaatacgatccatggaggctctgctcggtgactcaagtcgaagaagtgaaatgtgtattaagactcttaccaatctggctctgcaccatcctctactctgtggttttcacccaaatggcttcactgttcgttgtgcaaggagcagcgatgaagacaaacatcaaaaacttccggattccagcttcaagcatgtctagtttcgacattctcagtgtcgccttcttcatcttcgcatacaggcggtttcttgatccactctttgcaagacttaacaaaacagaacgcaacaaaggtctcactgagcttcagaggatggggattgggcttgtgattgcgataatggcgatgatttccgcaggaatcgtagagatacacagactgaaaaataaggaaccggaaagtgctacttcgatctcaagctccagcactttgagcattttttggcaagtacctcagtacatgttgataggtgcatcagaagtgttcatgtacgttggtcaactcgagttcttcaacagccaagcaccaaccgggctaaagagctttgcaagcgcgctatgtatggcttcaatatctcttgggaactatgtaagcagtttgttagtttccattgtcatgaagatctctacaacagatgatgtgcatggctggattcctgaaaatctcaacaaaggacacttggagagattctacttccttttagctggtctaaccgctgctgatttcgtggtttacttgatttgtgccaaatggtacaagtatattaaatctgaagcaagtttctctgagtccgtaactgaagaggaggaagtctgagtcaggagctagagagttttgtgttttattttaatgctgtgaagctttttacagtaatttgtttaaagctgagcttgttctgtgatataaactggtcttattgtgtttttatttttgggttatactcttgtgcaaagtttagttgatgtttctcaataaaggataagttgattccacagttccaac

SEQ ID NO: 426 - protein, 589 aa, Arabidopsis thaliana
  REGION 100..509: note = Pfam Name: PTR2 Pfam Description: POT family
  REGION 1..589: note = Ceres Annot ID no. 878355
  REGION 1..589: note = Bit score of 1309.7 for HMM based on sequences of Figure 11
MDQKVRQFEVCTQDGSVDRHGNPAIRANTGKWLTAILILVNQGLATLAFFGVGVNLVLFLTRVMGQDNAEAANNVSKWTGTVYIFSLLGAFLSDSYWGRYKTCAIFQASFVAGLMMLSLSTGALLLEPSGCGVEDSPCKPHSTFKTVLFYLSVYLIALGYGGYQPNIATFGADQFDAEDSVEGHSKIAFFSYFYLALNLGSLFSNTVLGYFEDQGEWPLGFWASAGSAFAGLVLFLIGTPKYRHFTPRESPWSRFCQVLVAATRKAKIDVHHEELNLYDSETQYTGDKKILHTKGFRFLDRAAIVTPDDEAEKVESGSKYDPWRLCSVTQVEEVKCVLRLLPIWLCTILYSVVFTQMASLFVVQGAAMKTNIKNFRIPASSMSSFDILSVAFFIFAYRRFLDPLFARLNKTERNKGLTELQRMGIGLVIAIMAMISAGIVEIHRLKNKEPESATSISSSSTLSIFWQVPQYMLIGASEVFMYVGQLEFFNSQAPTGLKSFASALCMASISLGNYVSSLLVSIVMKISTTDDVHGWIPENLNKGHLERFYFLLAGLTAADFVVYLICAKWYKYIKSEASFSESVTEEEEV

SEQ ID NO: 427 - DNA, 1821 bp, Populus balsamifera
  misc_feature 1..1821: note = Ceres Annot ID no. 1472338
  misc_feature 1..1821: note = Encodes the peptide sequence at SEQ ID NO. 428
  source 1..1821: mol_type = unassigned DNA; note = Populus balsamifera subsp. trichocarpa
atggcctgcttaaatatttgcaaagaggaaggaagcgtgcaggggaagctcgtgaagaaggagcaggaggtttgcactagggatggaagcgttgatcgacatggcgatcctgcaatccgggggaggactgggacttggttcgctggaatcctcatattagtgaatcaagggctggcgacgttggccttctttggggtaggagtgaacttggttctgtttttgacaagagtgttgggtcaagacaatgccgaagctgcaaacaacgtcagcaaatggactggaactgtttacatattctctcttctcggcgccttcctcagcgactcttactgggggaggtacaagacttgtgctatcttccaggccatcttcgtcactggtctggtattgttgtcactgtcttcctacttattcttactcaaaccgagaggctgtggtgatgaacattctccatgtggatcccattcaacataccagaatgtctttttctacttctccatctatcttgttgcccttggaaatggaggctaccagcctaacattgctacctttggggctgatcagtttgatgaagaggaccctaaagaaggccactctaagatagctttctttagctacttttacttggctctcaaccttggttctctcttttcgaacaccatattgggctattttgaggaccggggcatgtgggcgttaggattctgggcatctgctggctctgctcttttggcactggtcttgtttctcattgggactcccaggtatagacacttcacccccaagggcaaccccctctctaggtgttgccaggtgatggttgctgcaacaagaaaatggaaggttcagaggatgccaaatcaaggtgatgatcagtttgaatcggatgtcccaaaggacggttccaaaaatggggatagaaagatactacacacccaaggattcagattcttggatagagctgcaattattacatccaaggattatacagagaatcgcattcacgatccatggcgtgtctgcacagtaaatcaagttgaagaatttaaatgcatcctacgactcctccctatctggctgtgcacaattctttactctgtagttttcactcaaatggcatcactcttcgtcgaacaaggtgctgatatgaaaactacgatttcgaaattccacattcctccagcaagcatgtctagtttcgacatactcagtgttgcggctttcatattcatctataggagagttcttgatccccttgttgccagaataagaaaggaccctaagggcctgacagagcttcagaggatggggattggtctagttatcgcaataattgcaatggtttcggcagggattgtagagctattcaggttgaagtacgcaagaaaagactgtccaagatgcgaaagtgcgagttctttgagcatactttggcaaattcctcaatatgttctgataggagcatctgaggtgttcatgtatgtggggcaattagaattcttcaatgggcaagcacctgatggattgaagagcttcggcagtgcactttgcatgacatcaatatctctaggcaactatgtgagtagcttgctagtaacagtcgtaatgaagatatctaccagagatgagatgccaggatggatcccaggaaaccttaacaagggtcatctagacagatttttcttcctcttggcagttttgacaaccgcagatcttgttctgtacattatctgtgctagatggtacaagtacatcaagtttgagaggcagcaggaagcggatagtatattaagcaatgaagaggcagaccttagagtttga

SEQ ID NO: 428 - protein, 606 aa, Populus balsamifera
  REGION 114..521: note = Pfam Name: PTR2 Pfam Description: POT family
  REGION 1..606: note = Ceres Annot ID no. 1472338
  REGION 1..606: note = Bit score of 1378.9 for HMM based on sequences of Figure 11
  REGION 1..606: note = Functional Homolog Of SEQ ID NO. 426
  source 1..606: note = Populus balsamifera subsp. trichocarpa
MACLNICKEEGSVQGKLVKKEQEVCTRDGSVDRHGDPAIRGRTGTWFAGILILVNQGLATLAFFGVGVNLVLFLTRVLGQDNAEAANNVSKWTGTVYIFSLLGAFLSDSYWGRYKTCAIFQAIFVTGLVLLSLSSYLFLLKPRGCGDEHSPCGSHSTYQNVFFYFSIYLVALGNGGYQPNIATFGADQFDEEDPKEGHSKIAFFSYFYLALNLGSLFSNTILGYFEDRGMWALGFWASAGSALLALVLFLIGTPRYRHFTPKGNPLSRCCQVMVAATRKWKVQRMPNQGDDQFESDVPKDGSKNGDRKILHTQGFRFLDRAAIITSKDYTENRIHDPWRVCTVNQVEEFKCILRLLPIWLCTILYSVVFTQMASLFVEQGADMKTTISKFHIPPASMSSFDILSVAAFIFIYRRVLDPLVARIRKDPKGLTELQRMGIGLVIAIIAMVSAGIVELFRLKYARKDCPRCESASSLSILWQIPQYVLIGASEVFMYVGQLEFFNGQAPDGLKSFGSALCMTSISLGNYVSSLLVTVVMKISTRDEMPGWIPGNLNKGHLDRFFFLLAVLTTADLVLYIICARWYKYIKFERQQEADSILSNEEADLRV

SEQ ID NO: 429 - protein, 589 aa, Vitis vinifera
  REGION 98..506: note = Pfam Name: PTR2 Pfam Description: POT family
  REGION 1..589: note = Public GI ID no. 157344683
  REGION 1..589: note = Bit score of 1376.7 for HMM based on sequences of Figure 11
  REGION 1..589: note = Functional Homolog Of SEQ ID NO. 426
MYLNPLSECTFDGSVDRHGHPAVRARTGNWVTAILILVNQGLATLAFFGVGVNLVLFLTRVLGQDNATAANNVSKWTGTVYIFSLLGAFLSDSYWGRYKTCAIFQVIFVIGLVLLSLSSYIFLLKPNGCGDKEFPCGSHSTFEISFFYLSIYLIALGNGGYQPNIATFGADQFDEDNPKESHSKVAFFSYFYLALNLGSLFSNTILGYFEDGGRWVLGFWASSASAILALILFLFGIPRYRHFKPSGNPLSRFCRVVVAATRKWKVEMPPEGEDLYEVDGDDCSGNCRRKMLHTQGFKFLDKAAVLTAKEREQEDKESRSPWRICTVTQVEEVKCILRLLPIWLCTILYSVVFTQMASLFVEQGAAMKTTLLGFHIPPASMSSFDIVSVAAFIFIYRRVLDPLVARLKGTKARGLTELQRMGIGLIIAIIAMVAAGIVEWFRLKYAKKDCRQCESESSLSIFWQIPQYVLIGASEVFMYVGQLEFFNDQAPDGLKSFGSALCMTSISLGNYVSSLLVTIVMKFSTRDQMPGWIPSNLNKGHLDRFYFLLAALTMADFGVYIICAKWYKSIKLEGKYEDSNSKGSDDVMV

SEQ ID NO: 430 - protein, 589 aa, Medicago truncatula
  REGION 98..506: note = Pfam Name: PTR2 Pfam Description: POT family
  REGION 1..589: note = Public GI ID no. 87240677
  REGION 1..589: note = Bit score of 1329.2 for HMM based on sequences of Figure 11
  REGION 1..589: note = Functional Homolog Of SEQ ID NO. 426
MVNKELEVCTLDGSIDSHGHPAVRERTGTWFAGILILVNQGLATLAFFGVGVNLVLFLTRVMGQDNADAANNVSKWTGTVYIFSLLGAFLSDSYWGRYITCAIFQVIFVVGLVALSLTSYIFLLKPNGCGSKELPCGTHSSYETTLFYVSIYLVALGNGGYQPTIATFGADQFDESDPSEQHSKIAFFSYFYLALNIGSLFSNTILDYFEDDGLWTLGFCVSAGSAALALVLFLCGTSKYRYFKPVGNPLPRFCQVFVAAIRKWKVQMFDGEDKLHEVEDCLSNGGRKMYHTQGFRFLDKAAFITPKDLKQMEENKCSPWFLSTVTQVEEVKCILRLLPIWLCTILFSVVFSQMASLFVEQGAAMETKISTFHIPPASMSSFDILSVVSFIFIYRRILDPLVARFTKKSKGITELQRMGIGLVLAIIAMVSAGLVEIFRLKYAIKEEKNCSHCEGTSSLSIFWQVPQYVLIGASEVFMYVGQLEFFNSQAPDGLKSFGSALCMTSISLGNYVSSLLVAIVMKISTRNEGMLGWIPGNLNMGHLDRFYFLLAALTAADLLVYIAMARWYKYVKFHGNNIEQGNNIEENVV

SEQ ID NO: 431 - protein, 584 aa, Oryza sativa
  REGION 103..504: note = Pfam Name: PTR2 Pfam Description: POT family
  REGION 1..584: note = Public GI ID no. 115448297
  REGION 1..584: note = Bit score of 1337.7 for HMM based on sequences of Figure 11
  REGION 1..584: note = Functional Homolog Of SEQ ID NO. 426
  source 1..584: note = Oryza sativa subsp. japonica
MAPTAVDSKRISDITEDGSMDRRGNPAVKAKTGNWRSSILLLVNYGLVTCAFFGVGVNLVVFLRRVLHQDNAEAANSISKWTGTVYIFSLIGAFMSDSYWGRYITCAIFQMIYVTGLVILSLASWFLLVKPTGCGAAGEHCDAPSSAGVALFYLSTYMIAFGNGGYQPSIATFGSDQFDETDPREARSKVAFFSYFYLALNVGSLFSNTVLVYYEDEGRWVMGFWVSAAAAAMALVLFLLGTPNYRHFKPTGNPLTRIAQVFVAAFRKWRAEVPRSELLHEVDGDESQIAGIRKILHSDQIRFLDKAATVTEEDYCTPENMQDPWRLCTVTQVEEVKCILKMLPIWLCTIVYSVVFTQMASLFVEQGTTMNTNIGSFHVPAASMSVFDILSVLAFIAIYRRVLVPVMSRLSGNPQGLTELQRMGVGLVVGMAAMVVAGVVEVERLKRVGAPDQPSSLSVLWQVPQYALIGASEVFMYVGQLEFFNGQAPDGVKSFGSSLCMASISLGNYVSIMLVSVVTSLTAGDRRPGWIPGNLNSGHLDRFYFLLAALSLVDLAVYVACAVWYKGIKLDSNEEKANKITVHV

SEQ ID NO: 432 - DNA, 2233 bp, Panicum virgatum
  misc_feature 1..2233: note = Ceres Clone ID no. 1844568
  misc_feature 1..2233: note = Encodes the peptide sequence at SEQ ID NO. 433
  source 1..2233: mol_type = unassigned DNA
gcatgttcagctgttacactttcgcaatggataaccctgttcatccctagctaacacgaggtcttatatatcacaggctaaatcttgctggcaatacgatctttcaacttctccttacagcaagactgaagaaattcctgaacaagctgcggagaacagattaagcaagcaaggctgatagtgaagtttcagaaagctcattgaacgacgtgatggatcccaccactgttgaatcgaaatgggtgtctcccaccactgaagatgggtcaatggacaggagaggaaacccagctgccaaagcagcatctggaagatggagatctgccatcctgctgctcgccaactacgggctcgtgacgtgcgccttcttcggcgtcggtgtgaacctggtggtgttcctgcggcgggtgctccaccaggacaacgccgaggcggccaacaacatcagcaagtggaccggcaccgtctacatcttctcgctcatcggcgccttcctcagcgactcctactggggccgttacgtcacctgcgccatcttccagatcatctacgtgacgggcctggtgattctgtcgcttgcgtcatggttcttgctggtgaagccctccggctgcggcggcgtcgatgcgcgctgcgacgagccgtcggcgcccggcgtcgcgctcttctacctgtccacctacatgatcgcgttcggcaacggcgggtaccagccttcgatcgccacgttcgggtcggaccagttcgacgagacggaccccaaggaggcgcgctccaaggtcgccttcttcagctacttctacctggcgctcaacgtcgggtccctcttctccaacacggtgctggtgtactacgaggactcgggccgctgggtcatggggttctgggtctcggcggccgccgcggcgctggcgctcgtgctcttcctgctcggcacccccaactaccggcacttcaagccgagcggcaacccgctgacgcgcgtcgcgcaggtgttcgtcgccgcgctccgcaagtggcacgcggaggtgccccgagaagagttcctccacgaggtggaaggagaggaccccaaggtctcgggcatccgcaagatccttcacagcgacgagctcaggttcctcgacagggcggcgacggtcaccgaggaggagtacggcgcgccggagaagatgaaggacccgtggcggctctgcacggtgacgcaggtggaggaggtgaagtgcatcctgaagatgctgcccatctggctgtgcacgatcgtgtactcggtggtgttcacccagatggcgtccctgttcgtggagcagggcgccaccatgaacaccaacatcgggtcgttccacttccccgccgcgagcatgtcgctgttcgacatcctcagcgtgctggcgttcatcgccatctaccgccgcgtgctggtccccgtgatggcgcggctgtcgggcaacccgcagggcctgacggagctgcagcgcatgggcgtggggctcgtgatcggcatggcggccatggtggtggcgggcgcggtggaggtggagcggctgcggcgcgtggcggccccggaccagccgagctcgctgagcgtgctgtggcaggtgccgcagtacgcgctgatcggggcgtcggaggtgttcatgtacgtggggcagctggagttcttcaacgggcaggcccccgacggcgtgaagagcttcggcagcgcgctgtgcatggcgtccatctcgctggggaactacgtgagcatcatgctggtgagcgtggtcaccagcctcaccgccggggagaggcggcccgggtggatcccggggaacctcaactccggccacctcgacaggttctacttcctcctcgccgcgctctcgctagtggacctcgccgtgtacgtcgcgtgcgcgacgtggtacaagggcatcaagctcgatggcggcggcgagacgaggaagaaccccgcgcacgtttaaacactgggcctgggccgttcttttgggtgttctggtttggagacgtgccgtgctggcccgtagaaaataaaatgtcaaagaactggcatgtggtccgtgttggatggcctattttgttctgtgtctttggtctagctccaagaatcagtctcagaactccatgtaatgctgctatgtatgtaaatataataaatatagtatatgtatggatgtctgctgaacttgcatgcagccaacctgtcaaagacagacttttttgtgtgtgatcg

SEQ ID NO: 433 - protein, 583 aa, Panicum virgatum
  REGION 103..504: note = Pfam Name: PTR2 Pfam Description: POT family
  REGION 1..583: note = Ceres Clone ID no. 1844568
  REGION 1..583: note = Bit score of 1338.2 for HMM based on sequences of Figure 11
  REGION 1..583: note = Functional Homolog Of SEQ ID NO. 426
MDPTTVESKWVSPTTEDGSMDRRGNPAAKAASGRWRSAILLLANYGLVTCAFFGVGVNLVVFLRRVLHQDNAEAANNISKWTGTVYIFSLIGAFLSDSYWGRYVTCAIFQIIYVTGLVILSLASWFLLVKPSGCGGVDARCDEPSAPGVALFYLSTYMIAFGNGGYQPSIATFGSDQFDETDPKEARSKVAFFSYFYLALNVGSLFSNTVLVYYEDSGRWVMGFWVSAAAAALALVLFLLGTPNYRHFKPSGNPLTRVAQVFVAALRKWHAEVPREEFLHEVEGEDPKVSGIRKILHSDELRFLDRAATVTEEEYGAPEKMKDPWRLCTVTQVEEVKCILKMLPIWLCTIVYSVVFTQMASLFVEQGATMNTNIGSFHFPAASMSLFDILSVLAFIAIYRRVLVPVMARLSGNPQGLTELQRMGVGLVIGMAAMVVAGAVEVERLRRVAAPDQPSSLSVLWQVPQYALIGASEVFMYVGQLEFFNGQAPDGVKSFGSALCMASISLGNYVSIMLVSVVTSLTAGERRPGWIPGNLNSGHLDRFYFLLAALSLVDLAVYVACATWYKGIKLDGGGETRKNPAHV

SEQ ID NO: 434 - DNA, 2101 bp, Triticum aestivum
  misc_feature 1..2101: note = Ceres Clone ID no. 797829
  misc_feature 1..2101: note = Encodes the peptide sequence at SEQ ID NO. 435
  source 1..2101: mol_type = unassigned DNA
tacggagtgacagatacagaccgggcgtgcgagggagggaggaagggagctcggaggaagcagagggatcccatccgctccggcggtgccaggaagctgttcctctgagccgctgcagcgcgtagcctgactgagcagcgagagacaagcagcaaggtcagcagccatgggggaggtcgcggcggagctgtacacccaggatggcaccatcgacatcaagggcaacccggccctcaagaaggacaccggcaactggcgcgcatgcccctacatcctcgcgaacgagtgctgcgagcggctggcctattacggcatgagcaccaacctcgtcaacttcatgaaggaccggatgggcatggccaacgccgccgccgccaacaacgtcaccaactggggcggcacctgctacatcacgccgctcatcggcgccttcctcgccgacgcctacctcggccgcttctggaccatcgcctccttcatgatcatctacatcttcggcctcggcctgctcaccatggccacctccgtgcacggcctcgtgcccgcctgcgcctccaagggcgtctgcgaccccacgccgggccagtcggcggcggtcttcatcgcgctctacctcatcgcgctcggcaccggcgggatcaagccatgcgtgtcgtcgttcggggccgaccagttcgacgagcacgacgacgtggagcgcaagagcaagagctcgtttttcaattggttctacttctccatcaacatcggcgcgctggtggcctcgtccgtcctggtgtacgtgcagacgcatgtcgggtggagctggggcttcggcatccccgccgtcgtcatggccatcgccgtcggcagcttcttcgtcggcacgccgctctacaggcaccagcgccccggcggcagcccgctcacccgcatcgcgcaggtgctcgtcgccgccacgcgcaagctcggcgtccccgtcgacgggtcggcgctgtacgagaccgcggacagggagtccggcatcgagggcagccgcaagctggagcacacggagcagttcaggttcctcgacaaggcggccgtggagacgcaggcggacaagacggccaccgggccgtcgccgtggcggctgtgcacggtgacgcaggtggaggagctcaagagcgtggtgcggctgctgcccatctgggcgagcggcatcgtcttcgccacggtgtacgggcagatgagcaccatgttcgtgctgcagggcaacaccctggacgcctccatggggcccaagttcaagatcccctccgcctccctctccatcttcgacaccctcagcgtcatcgcctgggtgcccgtctacgaccgcatcctcgtccccgccgtgcgctccgtcaccggccggccccgcggcttcacccagctccagcgcatgggcatcggcctcgtcgtctccatgttcgccatgctcgccgccggcgtgctcgagctcgttcgcctccgcaccatcgcgcagcgcggcctctacggggagcacgacgtcgtgcccatctccatcttctggcaggtgccgcagtacttcatcatcggcgccgccgaggtgttcaccttcgtgggccagctcgagttcttctacgaccaggcgcccgacgccatgaggagcatgtgctccgcgctctccctcaccaccgtcgccctcgggaactacctcagcacgctcctcgtcaccgtcgtggccaagctcaccaccaggggaggcaagcaagggtggatccccgacaacctcaacgtcggccacctcgactacttcttctggctgctcgccgccctcagcctcctcaacttcgccgtctacctcctcatcgccagctggtacacctacaagaagaccgccggagatgatcacccagacgccatagccaaagggggagctcatgattgatgcacatgaccagtaaataagtgagtgactatgtctgcggttggtgtatgaatgttgaaagcagaagaagaaagcaaggattgagagttcggataggtgaaattaagggaggacaatgaaatgcatggtgtgatttgtgacttcaagattcaggagtgctgccttgttgattaatatactagtgtcttg

SEQ ID NO: 435 - protein, 581 aa, Triticum aestivum
  REGION 98..499: note = Pfam Name: PTR2 Pfam Description: POT family
  REGION 1..581: note = Ceres Clone ID no. 797829
  REGION 1..581: note = Bit score of 1242.8 for HMM based on sequences of Figure 11
  REGION 1..581: note = Functional Homolog Of SEQ ID NO. 426
MGEVAAELYTQDGTIDIKGNPALKKDTGNWRACPYILANECCERLAYYGMSTNLVNFMKDRMGMANAAAANNVTNWGGTCYITPLIGAFLADAYLGRFWTIASFMIIYIFGLGLLTMATSVHGLVPACASKGVCDPTPGQSAAVFIALYLIALGTGGIKPCVSSFGADQFDEHDDVERKSKSSFFNWFYFSINIGALVASSVLVYVQTHVGWSWGFGIPAVVMAIAVGSFFVGTPLYRHQRPGGSPLTRIAQVLVAATRKLGVPVDGSALYETADRESGIEGSRKLEHTEQFRFLDKAAVETQADKTATGPSPWRLCTVTQVEELKSVVRLLPIWASGIVFATVYGQMSTMFVLQGNTLDASMGPKFKIPSASLSIFDTLSVIAWVPVYDRILVPAVRSVTGRPRGFTQLQRMGIGLVVSMFAMLAAGVLELVRLRTIAQRGLYGEHDVVPISIFWQVPQYFIIGAAEVFTFVGQLEFFYDQAPDAMRSMCSALSLTTVALGNYLSTLLVTVVAKLTTRGGKQGWIPDNLNVGHLDYFFWLLAALSLLNFAVYLLIASWYTYKKTAGDDHPDAIAKGGAHD

SEQ ID NO: 436 - protein, 591 aa, Physcomitrella patens
  REGION 101..507: note = Pfam Name: PTR2 Pfam Description: POT family
  REGION 1..591: note = Public GI ID no. 168033816
  REGION 1..591: note = Bit score of 1251.7 for HMM based on sequences of Figure 11
  REGION 1..591: note = Functional Homolog Of SEQ ID NO. 426
  source 1..591: note = Physcomitrella patens subsp. patens
MNAVGGAPDSEYPQDGTVDLRGNPVLKANTGGWKACPYILGNECCERLAYYGIATNLVTYLSHELHQNPSTAANNVTNWSGTCYITTLIGAFLADAYLGRFWTIVVFSIIYFLGMVLLTLSAALPSLKPPSGEGVVASSTQLAVFYLALYLIALGTGGIKPCVSSFGADQFDENDVKEKKRKSSFFNWFYFTINIGALIASSALVYIQENVGWGWGFGIPAVAMGIAIVSFLIGSPLYRHQKPGGSPITRIAQVLVAATRKLSMKVQPNGKHLYEADDKESGIEGSRKLEHTEEFRFLDKAAIPRGDEELQGTRPSGWRLTSVTQVEEVKIVMRLLPIWASGIVFATVYSQMSTMFVQQGALMNVSMGKANIPSASLSIFDTISVIVCVVIYDRFLVPVVRKRTGHVRGFTQLQRMGIGLFISVLAMVVAAIVEIERLKLARRDGVAGNPQDEALPVESLTIFVQIPQYFLIGAAEVFTFVGQLEFFYDQAPDAMRSLMSALSLTTVALGNYLSSVLVTIVTEVTTKGGKPGWIPNNLNRGHLDYFFWMLAILSILNIIFYLVVAKFYTYKRVHNAADVGEDGKPSKSGYE

SEQ ID NO: 437 - protein, 594 aa, Picea sitchensis
  REGION 121..527: note = Pfam Name: PTR2 Pfam Description: POT family
  REGION 1..594: note = Public GI ID no. 116788004
  REGION 1..594: note = Bit score of 1291.6 for HMM based on sequences of Figure 11
  REGION 1..594: note = Functional Homolog Of SEQ ID NO. 426
MGVEGEGSVETALLEEGSISSVQTGKASEDEYTGDGSVDFWGRPSVKENTGNWRACPFILGNECCERLAYYGINTNLVTYLTKRLHQGNAAAAKSVTTWAGTCYLTPLFGAVLADAYWGRYWTIAAFSTIYFIGMATLTLSASVSSLKPPSCIGSDCPTANLAQYGVFFLGLYLIALGTGGIKPCVSSFGADQFDDTDPKEKKKKGSFFNWFYFSINVGALVSSSVLVWVQDNVGWGWGFGIPTLFMGLAIGSFFSGTPLYRLQKPGGSPVTRMCQVVVASLRKLRKTVPLDHSHLYEVQDRNSAIQGSRKLEHTDEFKCLDKSAIITDDDVRKGGFSNPWRLCTVTQVEEMKILLRMFPIWATGIVFAAVYSQISTMFVEQGMTLDTSIGSRFHIPPASLSVFDVVSVMIWVPVYDRVIVPIVSKYTKRERGFTELQRMGIGLFISILAMVAAALVEIRRLNIVKTYDLVYDKGTPVPMSIFWQIPQYFLVGASEVFTFVGQLEFFYDQSPDAMRSLCSALSLLTTALGNYLSSLIVTIVMFATTKGGNIGWIPDNLNEGHLDYYFWVLASLSVLNLLVYVSCAHRYKYKKAS

SEQ ID NO: 438 - protein, 583 aa, Hakea actites
  REGION 112..516: note = Pfam Name: PTR2 Pfam Description: POT family
  REGION 1..583: note = Public GI ID no. 149900503
  REGION 1..583: note = Bit score of 1297.0 for HMM based on sequences of Figure 11
  REGION 1..583: note = Functional Homolog Of SEQ ID NO. 426
MGSLEERLLVEDEPVKNDGIGLYTGDGSVDIDGKPVLKENTGKWRACPFILGTECCERLAYYGIATNLVTYLTSKLHEGNASAARNVTTWSGTCYLAPLIGAVLADSYWGRYWTIAVFSIIYFIGMGTLTLSASVAAFKPSPCVGSVCPAATPAQYAVFFCGLYLIALGTGGIKPCVSSFGADQFDDTDPVERVQKGSFFNWFYFSINIGALISSSFLVWIQDNAGWGLGFGIPTLFMGVAIISFFSGTPLYRFQKPGGSPLMRMCQVFVASFRKWNLDVPQDSSLLFELPDKTSAIEGSRKLEHSDELRCLDKAAVVSDLDVQQGDLTNPWRLCTVTQVEELKILIRMFPIWATGIVFSAVYAQMSTMFVEQGMVLDTTIGSFTIPPASLSTFDVLSVIVWVPMYDRLLVPLARKFTGKERGFSELQRMGIGLFISILSMTAAAIVEIRRLQIAKSLGLVDQNVAVPMSILWQIPQYFLVGASEIFTFIGQLEFFYDQSPDAMRSLCSALSLLTTALGNYLSSFILTMVTTITTRGGKPGWIPDNLNEGHLDYFFWLLAGLSFLNLVIYVFCAARYKCKKAS

SEQ ID NO: 439 - protein, 580 aa, Solanum lycopersicum
  REGION 109..513: note = Pfam Name: PTR2 Pfam Description: POT family
  REGION 1..580: note = Public GI ID no. 4102839
  REGION 1..580: note = Bit score of 1292.5 for HMM based on sequences of Figure 11
  REGION 1..580: note = Functional Homolog Of SEQ ID NO. 426
MKYLFSKNGGLLEDENSGLYTRDGSVDIKGNPVLKSETGNWRACPFILGNECCERLAYYGIAANLVTYLTKKLHEGNVSAARNVTTWQGTCYITPLIGAVLADAYWGRYWTIATFSTIYFIGMCTLTLSASVPAFKPPQCVGSVCPSASPAQYAIFFFGLYLIALGTGGIKPCVSSFGADQFDDTDPKERVKKGSFFNWFYFSINIGALISSSLIVWIQENAGWGLGFGIPAVFMGIAIASFFFGTPLYRFQKPGGSPLTRMCQVLVAVFHKWNLSVPDDSTLLYETPDKSSAIEGSRKLLHTDELRCLDKAAVVSDNELTTGDYSNAWRLCTVTQVEELKILIRMFPIWATGIVFSAVYAQMSTMFVEQGMVMDTAVGSFKIPAASLSTFDTISVIVWVPVYDKILVPIARRFTGIERGFSELQRMGIGLFLSMLCMSAAAIVEIRRLQLARDLGLVDEAVSVPLSIFWQIPQYFILGAAEIFTFIGQLEFFYDQSPDAMRSLCSALSLLTTALGNYLSSFILTVVTSITTRGGKPGWIPNNLNGGHLDYFFWLLAALSFFNLVIYVFLCQMYKSKKAS

SEQ ID NO: 440 - protein, 584 aa, Vicia faba
  REGION 114..518: note = Pfam Name: PTR2 Pfam Description: POT family
  REGION 1..584: note = Public GI ID no. 31088360
  REGION 1..584: note = Bit score of 1269.8 for HMM based on sequences of Figure 11
  REGION 1..584: note = Functional Homolog Of SEQ ID NO. 426
MGSVEDDSSRLEEALIQDEESKLYTGDGSVDFKGRPVLKKNTGNWKACPFILGNECCERLAYYGIATNLVKPILLAKLHEGNVSAARNVTTWQGTCYLAPLIGAVLADSYWGRYWTIAIFSMIYFIGMGTLTLSASIPALKPAECLGAVCPPATPAQYAVFFIGLYLIALGTGGIKPCVSSFGADQFDDTDSRERVKKGSFFNWFYFSINIGALISSSFIVWIQENAGWGLGFGIPALFMGLAIGSFFLGTPLYRFQKPGGSPLTRMCQVVAASFRKRNLTVPEDSSLLYETPDKSSAIEGSRKLQHSDELRCLDRAAVISDDERKRGDYSNLWRLCTVTQVEELKILIRMFPVWATGIVFSAVYAQMSTMFVEQGTMMDTSVGSFKIPAASLSTFDVISVIFWVPVYDRFIVPIARKFTGKERGFSELQRMGIGLFISVLCMSAAAIVEIKRLQLAKELDLVDKAVPVPLTIFLQIPQYFLLGAAEVFTFVGQLEFFYDQSPDAMRSLCSALSLLTTSLGNYLSSFILTVVLYFTTRGGNPGWIPDNLNKGHLDYFSGLAGLSFLNMFLYIVAAKRYKSKKAS

SEQ ID NO: 441 - DNA, 1821 bp, Sorghum bicolor
  misc_feature 1..1821: note = Ceres Annot ID no. 8681236
  misc_feature 1..1821: note = Encodes the peptide sequence at SEQ ID NO. 442
  source 1..1821: mol_type = unassigned DNA
atgaagatgagggcgatcgtcgtggaaggaggggagatgagcgcgccgacgccgacgccgaagcaggacaagtgctgcgagtacacgctcgacggctccgtcgacatcaagggccgcccggcggtcaaggggaaatcaggaggatggcttgccggtgctctaatccttgtgaaccagggcctggcgacactagccttcttcggcgtgaacgtgaacctggtgctgttcctgacgcgggtgctggggcagagcaacgaagacgccgccaacaacgtcagcaagtggacgggcaccgtgtacatgttctccctcatcggcgccttcctcagcgactcctactggggacgctacaagacctgcgccatcttccaggccatctttgtgctcggcctcgcgctgctgtcggtgtcgtcgcacctctacctaatcaggccggacgggtgcggcatggagcacgcgccctgcggcccgcactccggcaaggagctggggatcttctacatcgcgctgtacatgatcgccttcggcaacggcgggtaccagcccaacatcgccaccctgggcgccgaccagttcgacgaggacgaccccgccgaggcgcactccaaggtctccttcttcagctacttctacctcgccctcaacctcggctcgctcttctccaacaccttcctcagctacctcgaggacaagggcagctgggcgctcggcttctgggcctccaccgccgccgccgccaccgcgctcctgcttttcctcagcgggacgctccggtatcgctatttccagcccggagggaacccgatcgggaggatttgccaggtcgccatcgccgcgtccaggaaatggaaggcgggcgcgtcgaccaccggagtggtcagcctgtacgagggcgacgagaaggcggatgccgccggtggcaggaagcttttgcacacgcaagggttcagtttcttggaccgcgcggcgcacgctgacacggactccaagctcggcgcgcgcgacccctggaagctgtgcacggtgacgcaggtggaggaggtcaagagcatcctgaggctcctccccatctggctctgcaccatcctctactcggtcgtcttcacccagatggcctcgctctttgtcgtgcagggcgccgcgatgcgccgcaccaccccgttctccggcttctccgtcccgccctccagcatgtcggccttcgacatcctcgccgtcgccaccacgatcttcttgtaccgccgcgccatctgcccgttcctggcgcggctcaccggccgcccggccggccccaccgagctgcagaggatgggcctcggcctggtcgtgggtgccctggccatggccacggccgggacggtcgagcacttccggaaggccagggccaccgcggcgatgagcagcgacctgcatatcatgtggcaggtgccgcagtacgcgctgatcggcgtgtcggaggtgatgatgtacgtcgggcagctcgagttcttcaacggccagatgcccgacgggctcaaaagcttcgggagcgcgctctgcatgatgtccatgtcgctcggcaactacttcagtgacgtcatcgtgagcgcggtcaccaggctcaccacgacgcgagggcggtccgggtggatcccggctgacctcaacgagggccacctcgacaagttctacttcctgctcgccgtgctggccgtcgcggacttcgcggtgtacctcgtgtgcgcgagccgctacgggagcggcaaggtggacgggaggagcagcgacgacgaggaggagggagcggccggtcaggtgacatccctgccggcttacgcatga

SEQ ID NO: 442 - protein, 606 aa, Sorghum bicolor
  REGION 117..517: note = Pfam Name: PTR2 Pfam Description: POT family
  REGION 1..606: note = Ceres Annot ID no. 8681236
  REGION 1..606: note = Bit score of 1256.2 for HMM based on sequences of Figure 11
  REGION 1..606: note = Functional Homolog Of SEQ ID NO. 426
MKMRAIVVEGGEMSAPTPTPKQDKCCEYTLDGSVDIKGRPAVKGKSGGWLAGALILVNQGLATLAFFGVNVNLVLFLTRVLGQSNEDAANNVSKWTGTVYMFSLIGAFLSDSYWGRYKTCAIFQAIFVLGLALLSVSSHLYLIRPDGCGMEHAPCGPHSGKELGIFYIALYMIAFGNGGYQPNIATLGADQFDEDDPAEAHSKVSFFSYFYLALNLGSLFSNTFLSYLEDKGSWALGFWASTAAAATALLLFLSGTLRYRYFQPGGNPIGRICQVAIAASRKWKAGASTTGVVSLYEGDEKADAAGGRKLLHTQGFSFLDRAAHADTDSKLGARDPWKLCTVTQVEEVKSILRLLPIWLCTILYSVVFTQMASLFVVQGAAMRRTTPFSGFSVPPSSMSAFDILAVATTIFLYRRAICPFLARLTGRPAGPTELQRMGLGLVVGALAMATAGTVEHFRKARATAAMSSDLHIMWQVPQYALIGVSEVMMYVGQLEFFNGQMPDGLKSFGSALCMMSMSLGNYFSDVIVSAVTRLTTTRGRSGWIPADLNEGHLDKFYFLLAVLAVADFAVYLVCASRYGSGKVDGRSSDDEEEGAAGQVTSLPAYA

SEQ ID NO: 443 - DNA, 1779 bp, Glycine max
  misc_feature 1..1779: note = Ceres Annot ID no. 8519531
  misc_feature 1..1779: note = Encodes the peptide sequence at SEQ ID NO. 444
  source 1..1779: mol_type = unassigned DNA
atggaaccaggaatttgcaattctgtcaactccgtaaatgttgaagcaaccgagaaaaaggtgacaggaggaaatggaagctacacagagcagtcagacacaagctataagaagattaaaggaggttggaaaactgcaattatcttgttagcgaatcaagcactggctacactagctttctttggagttggagtgaacttggttctgtttctgacccgagtccttcgccaagacagtgctgaggctgctaacaatgtcagcaagtggaccggaactgtttacatattttcactcattggagccttcctcagtgattcttactggggacgatatttaacctgcgcaatctttcagttcatttttgttgtgggcttggggatgttgtcattgtcgtcttggcggtttttgatcaaaccggttggttgcggcaatgaagaaactacatgcttggaaccatcatcagtgggtgttggcattttctacttgtccatatatctagtggcatttggatatggagggcaccaacccaccttagcaacctttggtgcagatcaatttgacgagaagaacgaaaaacaaaagaacgcgagagaagctttcttctcttatttttactttgccctcaatgttggatctctgttctccaacactatattagtatactacgaggattcaggaatgtggacaatgggtttcttggtgtccttggcctcagctgttattgccttagtttcatacttagcaggatatcgaaaatatagatatgtaaagggatatgggaatccggtgataagggtagttcaggtgtttgtggccactgttagaaagtggaaggttggtccagccaaggaacaccaactttatgaggttgatggtccagaatctgccataaaagggagtagaaagattcatcacagcaatgattttagattcatggacaaggcagcaacaataacggagaaagatgcagttaatctcaagaatcactggcggctatgtactgtaactcaagttgaggaagccaaatgcgtactgagaatgctaccagtttggctatgtactataatttattcagttgtgtttacgcaaatggcttctctttttgtcgagcaaggggatgtgatgaacaacaagataggaaattttcacttgccagcagccagcatgtcagtgtttgatatctgcagtgtccttttatgcactggaatttatcgccaaatccttgttcctctagcaggaagatttagtggcaatcctaggggactaactgagcttcaaagaatgggagttggcctaattattggaatgttagctattcttgcagctggtgccacagagtttgaaaggctcaaacacattacacccggggaaaaggctagttctttgagtatattttggcaaatcccacagtatgttctagttggtgcttcagaagttttcatgtatgtgggtcaactggagttctttaatgggcaagccccagatggcataaaaagctttgggagctcactttgcatggcttcaatttctcttggaaactatgtgagtagcttgctggtgtacatggtgatgggaatcactgcaagaggcgagaatccgggatggattcccaataacttgaatgtggggcacatggataggtttttcttcctcgttgcagtgctaactgctcttgattttgtactctacttattatgtgctcgctggtacaagagcatcaaccttggagatggtgacatgggaagccaagaggacgaggaagtgatcagtaaagtttga

SEQ ID NO: 444 - protein, 592 aa, Glycine max
  REGION 111..509: note = Pfam Name: PTR2 Pfam Description: POT family
  REGION 1..592: note = Ceres Annot ID no. 8519531
  REGION 1..592: note = Bit score of 1264.8 for HMM based on sequences of Figure 11
  REGION 1..592: note = Functional Homolog Of SEQ ID NO. 426
MEPGICNSVNSVNVEATEKKVTGGNGSYTEQSDTSYKKIKGGWKTAIILLANQALATLAFFGVGVNLVLFLTRVLRQDSAEAANNVSKWTGTVYIFSLIGAFLSDSYWGRYLTCAIFQFIFVVGLGMLSLSSWRFLIKPVGCGNEETTCLEPSSVGVGIFYLSIYLVAFGYGGHQPTLATFGADQFDEKNEKQKNAREAFFSYFYFALNVGSLFSNTILVYYEDSGMWTMGFLVSLASAVIALVSYLAGYRKYRYVKGYGNPVIRVVQVFVATVRKWKVGPAKEHQLYEVDGPESAIKGSRKIHHSNDFRFMDKAATITEKDAVNLKNHWRLCTVTQVEEAKCVLRMLPVWLCTIIYSVVFTQMASLFVEQGDVMNNKIGNFHLPAASMSVFDICSVLLCTGIYRQILVPLAGRFSGNPRGLTELQRMGVGLIIGMLAILAAGATEFERLKHITPGEKASSLSIFWQIPQYVLVGASEVFMYVGQLEFFNGQAPDGIKSFGSSLCMASISLGNYVSSLLVYMVMGITARGENPGWIPNNLNVGHMDRFFFLVAVLTALDFVLYLLCARWYKSINLGDGDMGSQEDEEVISKV

SEQ ID NO: 445 - DNA, 1749 bp, Zea mays
  misc_feature 1..1749: note = Ceres Annot ID no. 8631372
  misc_feature 1..1749: note = Encodes the peptide sequence at SEQ ID NO. 446
  source 1..1749: mol_type = unassigned DNA
atggatgctaccactgttgattccaaatggatctctcccgccactgaagatgggtccatggacaggcgaggaaacccagctgtcaagacaaccaccggaagatggagatctgccatcctgctgctagctaactatgggctcgcgacgtgcgccttcttcggcgtcggcgtgaacctcgtggtgttcctgcgccgggtgctccaccagggcaacgccgaggcggccaacagcatcagcaagtggactgggaccgtctacatcttctcgctcatcggcgccttcctcagcgactcctactggggccgatacgtcacgtgcgccgtcttccagatcatctacgtgatggggctggtggtcctgtcgctcgcgtcatggctcttgctggtgaagccgtccggctgcggcggcgtcaaggcgcactgcgacgggccgtcggcgcccggcgtcgcgctgttctacctgtccacctacatgatcgcgttcggcaacggagggtaccagccttccatcgcgacgttcgggtcggaccagttcgacgagacggaccccgaggaggcgcgctccaaggtggccttcttcagctacttctacctggcgctcaacgtcggctccctgctctccaacacggtgctggtgtactacgaggactcggggcggtgggtcatggggttctgggtctcggcggccgccgcggcgctggcgctcgtgctcttcctgctcggcacgcccggctaccgccacttcaagccgagcggcaacccgctcacccgcgtcgcgcaggtgttcgtcgccgcgctgcgcaagtggcgcgccgaggtcccgcgtggcgagctcctccacgaggtggtggaagcaggagaggaccctaaggtctcgggcatccgcaagatccttcacagcgacgggctcaggttcctcgacaaggcggcgacgatcacggaggaggaggaggaggagggtccgtggcggctctgcacggtgacgcaggtggaggaggtgaagtgcatcctgaggatgctgcccatctggctgtgcacgatcgtgtactcggtggtgttcacccagatggcgtcgctgttcgtggagcagggcgccaccatggacaccaacatcgggtcgttccacttccccgccgcgagcatgtcgctgttcgacgtcctcagcgtgctggcgttcatcgccatctaccggcgggtgctggtgcccgtcatggcgcggctgtcaggcaacccgcagggcctgaccgagctgcagcgcatgggcgtcgggctcgtgatcggcatggcggcgatggtggtggcgggcgtggtggaggtggagcggctgaagcgcgtggcggccccggaccagccgagctccctgagcgtgctgtggcaggtgccgcagtacgcgctgatcggggcgtcggaggtgttcatgtacgtggggcagctggagttcttcaacgggcaggcgcccgacggcgtcaagagcttcggcagcgcgctgtgcatggcgtccatctcgctggggaactacgtgagcatcatgctggtgagcgtagtcacgagcctcaccgccggtgagaagcgtccggggtggatccctgggaaccttaactcaggacacctcgacaggttctacttcctcctcgccgctctctcgctcgtggacctcgccgtctacgtcgcctgtgccatgtggtacaagggcatcaagcttgacggcggcgacggcgataacaggagaaaggtctctgcgcacgtctag

SEQ ID NO: 446 - protein, 582 aa, Zea mays
  REGION 103..501: note = Pfam Name: PTR2 Pfam Description: POT family
  REGION 1..582: note = Ceres Annot ID no. 8631372
  REGION 1..582: note = Bit score of 1317.4 for HMM based on sequences of Figure 11
  REGION 1..582: note = Functional Homolog Of SEQ ID NO. 426
MDATTVDSKWISPATEDGSMDRRGNPAVKTTTGRWRSAILLLANYGLATCAFFGVGVNLVVFLRRVLHQGNAEAANSISKWTGTVYIFSLIGAFLSDSYWGRYVTCAVFQIIYVMGLVVLSLASWLLLVKPSGCGGVKAHCDGPSAPGVALFYLSTYMIAFGNGGYQPSIATFGSDQFDETDPEEARSKVAFFSYFYLALNVGSLLSNTVLVYYEDSGRWVMGFWVSAAAAALALVLFLLGTPGYRHFKPSGNPLTRVAQVFVAALRKWRAEVPRGELLHEVVEAGEDPKVSGIRKILHSDGLRFLDKAATITEEEEEEGPWRLCTVTQVEEVKCILRMLPIWLCTIVYSVVFTQMASLFVEQGATMDTNIGSFHFPAASMSLFDVLSVLAFIAIYRRVLVPVMARLSGNPQGLTELQRMGVGLVIGMAAMVVAGVVEVERLKRVAAPDQPSSLSVLWQVPQYALIGASEVFMYVGQLEFFNGQAPDGVKSFGSALCMASISLGNYVSIMLVSVVTSLTAGEKRPGWIPGNLNSGHLDRFYFLLAALSLVDLAVYVACAMWYKGIKLDGGDGDNRRKVSAHV

SEQ ID NO: 447 - protein, 614 aa, Hordeum vulgare
  REGION 122..527: note = Pfam Name: PTR2 Pfam Description: POT family
  REGION 1..614: note = Public GI ID no. 151426449
  REGION 1..614: note = Bit score of 1253.5 for HMM based on sequences of Figure 11
  REGION 1..614: note = Functional Homolog Of SEQ ID NO. 426
MSANEGDLKMRVIAMGGEAASERRAAEEKLCEYTLDGSVDIKGRPAVKGKSGGWLAGGLILVNQGLATMAFFGVNVNLVLFLTRLVQQSNGDAANNVSKWTGTVYMFSLIGAFLSDSYWGRYKTCAIFQAIFVLGLGLLSLSSRLYLIRPVGCGTEHTPCASHSGTEMGIFYIALYMIAFGNGGYQPNIATFGADQFDEEDPAEAHSKVSFFSYFYMALNLGSLFSNTFLSYLQDHGKWVLGFWASTAAAATALLLFLSGTPQYRHAQPCGNPMASICQVASAACRNWKSGGVSPDVEILYEGDDKTDSGSRKLLHTKGFRFLDRAALTTEDTNSKLATCSKTRDQWRLCTVTQVEQVKSILRILPIWVCTILYSVVFTQMASLFVVQGAAMRRTTPLGSFSIPASSMSAFDILTVTTTIFLYRRAICPLLARLTGRPTGPTELQRMGLGLVLGAMAMANAGTVEHFRKASATTANGSELHILWQVPQYALIGVSEVMMYVGQLEFFNGEMPDGFKSFGSALCMMSMSLGNYFSDIIVSAVTKATAVDGRPGWIPADLNEGHLNKFYFLLAILSVADFAVYLVFAGRYRKSCKVEGRSDDEEEGSVDDEEACHA

SEQ ID NO: 448 - protein, 582 aa, Brassica rapa
  REGION 100..504: note = Pfam Name: PTR2 Pfam Description: POT family
  REGION 1..582: note = Public GI ID no. 192757675
  REGION 1..582: note = Bit score of 1309.3 for HMM based on sequences of Figure 11
  REGION 1..582: note = Functional Homolog Of SEQ ID NO. 426
MDQKVRHTEVCTQDGSVDRHGNPAIRAKTGKWLTAILILVNQGLATLAFFGVGVNLVLFLTRVMGQDNAEAANNVSKWTGTVYIFSLLGAFLSDSYWGRYKTCAIFQASFVAGLVMLSLSTGALLLEPSGCGVEESPCKPHSTVKTVIFYLSVYLIALGYGGYQPNIATFGSDQFDADDSVEGHSKIAFFSYFYLALNLGSLLSNTVLGYFEDQGAWPLGFWASAGSAFAGLVLFLAGTPKYRHFKPRESPWSRFCQVLVASTRKAKIDVNYDDMNLYDSETQRTGDKKILHTKGFRFLDRAAIVTPDDEAEKVESGSAYDPWRLCSVTQVEEVKCVLRLLPIWLCTILYSVVFTQMASLFVVQGAAMKTNIKDFRIPASSMSTFDILSVAFFIFAYRRFLDPLFARLNKTEPNKGLTELQRMGIGLVIAITAMISAGIVEIYRLKHKETASNSSSLSIFWQVPQYMMIGASEVFMYVGQLEFFNSQAPTGLKSFASALCMASISLGNYVSSLLVSIVMKISTRDDLPGWIPGNLNKGHLDRFYFLLAALTAADFVVYLVCAKWYKYIKSEASFSESIAEEE

SEQ ID NO: 449 - protein, 579 aa, Hordeum vulgare
  REGION 98..499: note = Pfam Name: PTR2 Pfam Description: POT family
  REGION 1..579: note = Public GI ID no. 2655098
  REGION 1..579: note = Bit score of 1231.9 for HMM based on sequences of Figure 11
  REGION 1..579: note = Functional Homolog Of SEQ ID NO. 426
  source 1..579: note = Hordeum vulgare subsp. vulgare
MGEVAAEMYTQDGTVDIKGNPALKKDTGNWRACPYILANECCERLAYYGMSTNLVNFMKDRMGMANAAAANNVTNWGGTCYITPLIGAFLADAYLGRFWTIASFMIIYIFGLGLLTMATSVHGLVPACASKGVCDPTPGQSAAVFIALYLIALGTGGIKPCVSSFGADQFDEHDDVERKSKSSFFNWFYFSINIGALVASSVLVYVQTHVGWSWGFGIPAVVMAIAVGSFFVGTSLYRHQRPGGSPLTRIAQVLVAATRKLGVAVDGSALYETADKESGIEGSRKLEHTRQFRFLDKAAVETHADRTAAAPSPWRLCTVTQVEELKSVVRLLPIWASGIVFATVYGQMSTMFVLQGNTLDASMGPKFKIPSASLSIFDTLSVIAWVPVYDRILVPAVRSVTGRPRGFTQLQRMGIGLVVSMFAMLAAGVLELVRLRTIAQHGLYGEKDVVPISIFWQVPQYFIIGCAEVFTFVGQLEFFYDQAPDAMRSMCSALSLTTVALGNYLSTLLVTVVAKVTTRGGKQGWIPDNLNVGHLDYFFWLLAALSLVNFAVYLLIASWYTYKKTAGDSPDAKGGAHDQ

SEQ ID NO: 450 - protein, 580 aa, Zea mays
  REGION 97..499: note = Pfam Name: PTR2 Pfam Description: POT family
  REGION 1..580: note = Public GI ID no. 194690746
  REGION 1..580: note = Bit score of 1197.4 for HMM based on sequences of Figure 11
  REGION 1..580: note = Functional Homolog Of SEQ ID NO. 426
MGEVEDMYTQDGTVDMKGNPAVKKGTGNWRACPYILANECCERLAYYGMSTNLVNYMKTRLGQVNSVASNNVTNWQGTCYITPLIGAFFADAYMGRFWTIAIFMIIYIFGLALLTMASSVKGLVPTSCGDKDVCHPTDAQAAVVFVALYLIALGTGGIKPCVSSFGADQFDENDEREKKSKSSFFNWFYFSINIGALVASTVLVYVQTHVGWGWGFGIPAVVMAIAVGSFFVGTPLYRHQKPGGSPLTRIAQVLVACARKWNVAVPADKSRLHETVDGESVIEGSRKLEHSEQLACLDRAAVVTAEDGAEASPWRLCSVTQVEELKSVIRLLPIWASGIVFAAVYSQMSTMFVLQGNTLDQSMGPRFKIPSATLSMVDTISVIVWVPVYDRAIVPLVRSYTGRPRGFTQLQRMGIGLVVSIFSMVAAGVLDIVRLRAIARHGLYGEDDIVPISIFWQIPQYFIIGCAEVFTFVGQLEFFYDQAPDAMRSMCSALSLTTVALGNYLSTVLVTIVTHITTRHGRIGWIPENLNRGHLDYFFWLLAVLSLLNFLAYLVIASWYKYKKTADDYPGAKGEHGTEH

SEQ ID NO: 451 - DNA, 2186 bp, Triticum aestivum
  misc_feature 1..2186: note = Ceres Clone ID no. 752925
  misc_feature 1..2186: note = Encodes the peptide sequence at SEQ ID NO. 452
  source 1..2186: mol_type = unassigned DNA
aaaggtggctgtggctcacacacacacacacacacacgcagagacaagagacaagagacagcgagtcagaccaggccatagggaatcccgcgcgcggggcgggcgacgactgaggcggagatcccttccggccggccgccgccgctcgtggacaccgaccaacataggaagcagcagttcctctgagccgctgccgctgcagtgcctagtctgactgagcggcgagaaagaagcaaggccagcagccatgggggaggtcgcggcggagatgtacacccaggatggcaccgtcgacatcaagggcaacccggccctcaagaaggacaccggcaactggcgcgcatgcccctacatcctcgcgaacgagtgctgcgagcggctggcctactatggcatgagcaccaacctggtcaacttcatgaaggaccggatgggcatggccaacgccgccgccgccaacaacgtcaccaactggggcggcacctgctacatcacgccgctcatcggcgccttcctcgccgacgcctacctcggccgcttctggaccatcgcctccttcatgatcatctacatcttcggcctcggcctgctcaccatggccacctccgtgcacggcctcgtgccgacctgcgccgccaagggcgtctgcgaccccacgccgggccagtcggcggccgtcttcatcgcgctctacctcatcgcgctcggcaccggcgggatcaagccctgcgtgtcgtcgttcggggcggaccagttcgacgagcacgacgacgtggagcgcaagagcaagagctccttcttcaactggttctacttctccatcaacatcggcgcgctggtggcctcgtccgtgctcgtgtacgtgcagacgcatgtcggctggagctggggcttcggcatccccgccgtcgtcatggccatcgccgtcggcagcttcttcgtcggcacgccgctctacaggcaccagcgccccggcggcagcccgctcacccgcatcgcgcaggtgctcgtcgccgccacgcgcaagctcggcgtcaccgtcgacgggtcggcgctgtacgagaccgcggacagggagtccggcatcgaggggagccgcaagctggagcacactgagcagttgaggttcctcgacaaggcggccgtcgagacgcaggcggacaagacggcggccaccgggccgtcgccgtggcggctgtgcaccgtgacgcaggtggaggagctcaagagcgtggtgcggctgctgcccatctgggcgagcggcatcgtcttcgccacggtgtatgggcagatgagcaccatgttcgtgctccagggaaacaccctggacgcctccattgggcccaagttcaagatcccctccgcctcgctctccatcttcgacaccctcagcgtcatcgcctgggtgcccgtctacgaccgcctcctcgtccccgccgtgcgctccgtcaccggccagccccgcggcttcacgcagctccagcgcatgggcatcggcctcctcgtctccatgttcgccatgctcgccgccggcgtgctcgagctcgtccgcctccgcaccatcgcgcagcgcggcctctacggcgagaaggacgtggtgcccatctccatcttctggcaggtgccgcagtacttcatcatcggcgccgccgaggtcttcaccttcgtgggccagctcgagttcttctacgaccaggcgcccgacgccatgaggagcatgtgctccgcgctctccctcaccaccgtcgcgctcgggaactacctcagcacgctgctcgtcaccgtcgtggccaagctcaccaccaggggaggcaagcaagggtggatccccgacaacctcaacgtcggccacctcgactacttcttctggctgctcgccgcgctcagcctcctcaacttcgccgtctacctcctcatcgccagctggtacacctacaagaagaccgccggagatgacacagacgccaaagccaaaggaggcgctgatgattgatgcaaatgaccagtgagtgagtgactctgcctggggttggtgtatgaatgttgaaagaggaagaagaaagcaaggattgagacttcagagttcagataggtgaaattaagggaggacaatgaaatgcatggtgtgatttgtgacttgaagattcaagagtgttgccttgttgatttatatactagtgtcttgg

SEQ ID NO: 452 - protein, 581 aa, Triticum aestivum
  REGION 98..500: note = Pfam Name: PTR2 Pfam Description: POT family
  REGION 1..581: note = Ceres Clone ID no. 752925
  REGION 1..581: note = Bit score of 1236.7 for HMM based on sequences of Figure 11
  REGION 1..581: note = Functional Homolog Of SEQ ID NO. 426
MGEVAAEMYTQDGTVDIKGNPALKKDTGNWRACPYILANECCERLAYYGMSTNLVNFMKDRMGMANAAAANNVTNWGGTCYITPLIGAFLADAYLGRFWTIASFMIIYIFGLGLLTMATSVHGLVPTCAAKGVCDPTPGQSAAVFIALYLIALGTGGIKPCVSSFGADQFDEHDDVERKSKSSFFNWFYFSINIGALVASSVLVYVQTHVGWSWGFGIPAVVMAIAVGSFFVGTPLYRHQRPGGSPLTRIAQVLVAATRKLGVTVDGSALYETADRESGIEGSRKLEHTEQLRFLDKAAVETQADKTAATGPSPWRLCTVTQVEELKSVVRLLPIWASGIVFATVYGQMSTMFVLQGNTLDASIGPKFKIPSASLSIFDTLSVIAWVPVYDRLLVPAVRSVTGQPRGFTQLQRMGIGLLVSMFAMLAAGVLELVRLRTIAQRGLYGEKDVVPISIFWQVPQYFIIGAAEVFTFVGQLEFFYDQAPDAMRSMCSALSLTTVALGNYLSTLLVTVVAKLTTRGGKQGWIPDNLNVGHLDYFFWLLAALSLLNFAVYLLIASWYTYKKTAGDDTDAKAKGGADD

SEQ ID NO: 453 - protein, 574 aa, Oryza sativa
  REGION 103..494: note = Pfam Name: PTR2 Pfam Description: POT family
  REGION 1..574: note = Public GI ID no. 125540898
  REGION 1..574: note = Bit score of 1301.5 for HMM based on sequences of Figure 11
  REGION 1..574: note = Functional Homolog Of SEQ ID NO. 426
  source 1..574: note = Oryza sativa subsp. indica
MAPTAVDSKRISDITEDGSMDRRGNPAVKAKTGNWRSSILLLVNYGLVTCAFFGVGVNLVVFLRRVLHQDNAEAANSISKWTGTVYIFSLIGAFMSDSYWGRYITCAIFQMIYVTGLVILSLASWFLLVKPTGCGAAGEHCDAPSSAGVALFYLSTYMIAFGNGGYQPSIATFGSDQFDETDPREARSKVAFFSYFYLALNVGSLFSNTVLVYYEDEGRWVMGFWVSAAAAAMALVLFLLGTPNYRHFKPTGNPLTRIAQVFVAAFRKWRAEVPRSELLHEVDGDESQIAGIRKILHSDQIRFLDKAATVTEEDYCTPENMQDPWRLCTVTQVEEVKCILKMLPIWLCTIVYSVVFTQMASLFVEQGTTMNTNIGSFHVPAASMSVFDILSVLAFIAIYRRVLVPGLTELQRMGVGLVVGMAAMVVAGVVEVERLKRVGAPDQPSSLSVLWQVPQYALIGASEVFMYVGQLEFFNGQAPDGVKSFGSSLCMASISLGNYVSIMLVSVVTSLTAGDRRPGWIPGNLNSGHLDRFYFLLAALSLVDLAVYVACAVWYKGIKLDSNEEKANKITVHV

SEQ ID NO: 454 - protein, 589 aa, Arabidopsis thaliana
  REGION 100..509: note = Pfam Name: PTR2 Pfam Description: POT family
  REGION 1..589: note = Public GI ID no. 26451333
  REGION 1..589: note = Bit score of 1306.0 for HMM based on sequences of Figure 11
  REGION 1..589: note = Functional Homolog Of SEQ ID NO. 426
MDQKVRQFEVCTQDGSVDRHGNPAIRANTGKWLTAILILVNQGLATLAFFGVGVNLVLFLTRVMGQDNAEAANNVSKWTGTVYIFSLLGAFLSDSYWGRYKTCAIFQASFVAGLMMLSLSTGALLLEPSGCGVEDSPCKPHSTFKTVLFYLSVYLIALGYGGYQPNIATFGADQFDAEDSVEGHSKIAFFSYFYLALNLGSLFSNTVLGYFEDQGEWPLGFWASAGSAFAGLVLFLIGTPKYRHFTPRESPWSRFCQVLVAATRKAKIDVHHEELNLYDSETQYTGDKKILHTKGFRFLDRAAIVTPDDEAEKVESGSKYDPWRLCSVTQVEEVKCVLRLLPIWLCTILYSVVFTQMASLFVVQGAAMKTNIKNFRIPASSMSSFDILNVAFFIFAYRRFLDPLFARLNKTERNKGLTELQRMGIGLVIAIMAMISAGIVEIHRLKNKEPESATSISSSSTLSIFWQVPQYMLIGASEVFMYVGQLEFFNSQAPTGLKSFASALCMASISLGNYVSSLLVSIVMKISTTDDVHGWIPENLNKGHLERFYFLLAGLTAADFVVYLICAKWYKYIKSEASFSESVTEEEEV

SEQ ID NO: 455 - protein, 568 aa, Arabidopsis thaliana
  REGION 109..501: note = Pfam Name: PTR2 Pfam Description: POT family
  REGION 1..568: note = Public GI ID no. 2160144
  REGION 1..568: note = Bit score of 1035.6 for HMM based on sequences of Figure 11
  REGION 1..568: note = Functional Homolog Of SEQ ID NO. 426
MFKILTTKIQSFFCLNISGGTEDGSIDIYGNPPSKKKTGNWKACPFILGNECCERLAYYGIAKNLITYYTSELHESNVSAASDVMIWQGTCYITPLIGAVIADSYWGRYWTIASFSAIYFIGMALLTLSASLPVLKPAACAGVAAALCSPATTVQYAVFFTGLYLIALGTGGIKPCVSSFGADQFDDTDPRERVRKASFFNWFYFSINIGSFISSTLLVWVQENVGWGLGFLIPTVFMGVSIASFFIGTPLYRFQKPGGSPITRVCQVLVAAYRKLKLNLPEDISFLYETREKNSMIAGSRKIQHTDAAVISEYESKSGAFSNPWKLCTVTQVEEVKTLIRMFPIWASGIVYSVLYSQISTLFVQQGRSMNRIIRSFEIPPASFGVFDTLIVLISIPIYDRFLVPFVRRFTGIPKGLTDLQRMGIGLFLSVLSIAAAAIVETVRLQLAQDFVAMSIFWQIPQYILMGIAEVFFFIGRVEFFYDESPDAMRSVCSALALLNTAVGSYLSSLILTLVAYFTALGGKDGWVPDDLNKGHLDYFFWLLVSLGLVNIPVYALICVKHTKKKAL

SEQ ID NO: 456 - protein, 590 aa, Arabidopsis thaliana
  REGION 124..523: note = Pfam Name: PTR2 Pfam Description: POT family
  REGION 1..590: note = Public GI ID no. 30696666
  REGION 1..590: note = Bit score of 1070.9 for HMM based on sequences of Figure 11
  REGION 1..590: note = Functional Homolog Of SEQ ID NO. 426
MVNSNEEDERRILDVEESLLTQEEVNNHLTGLSSTAEDGSIDIYGNPPSKKKTGNWKACPFILGNECCERLAYYGIAKNLITYYTSELHESNVSAASDVMIWQGTCYITPLIGAVIADSYWGRYWTIASFSAIYFIGMALLTLSASLPVLKPAACAGVAAALCSPATTVQYAVFFTGLYLIALGTGGIKPCVSSFGADQFDDTDPRERVRKASFFNWFYFSINIGSFISSTLLVWVQENVGWGLGFLIPTVFMGVSIASFFIGTPLYRFQKPGGSPITRVCQVLVAAYRKLKLNLPEDISFLYETREKNSMIAGSRKIQHTDGYKFLDKAAVISEYESKSGAFSNPWKLCTVTQVEEVKTLIRMFPIWASGIVYSVLYSQISTLFVQQGRSMNRIIRSFEIPPASFGVFDTLIVLISIPIYDRFLVPFVRRFTGIPKGLTDLQRMGIGLFLSVLSIAAAAIVETVRLQLAQDFVAMSIFWQIPQYILMGIAEVFFFIGRVEFFYDESPDAMRSVCSALALLNTAVGSYLSSLILTLVAYFTALGGKDGWVPDDLNKGHLDYFFWLLVSLGLVNIPVYALICVKHTKKKAL

SEQ ID NO: 457 - protein, 561 aa, Oryza sativa
  REGION 91..486: note = Pfam Name: PTR2 Pfam Description: POT family
  REGION 1..561: note = Public GI ID no. 125556922
  REGION 1..561: note = Bit score of 1005.3 for HMM based on sequences of Figure 11
  REGION 1..561: note = Functional Homolog Of SEQ ID NO. 426
  source 1..561: note = Oryza sativa subsp. indica
MEATTTDGTTDHAGKPAVRSKSGTACPFILGNECCERLAYYGMSANLVNYMVDRLRQGNAGAAASVNNWSGTCYVMPLVGAFLADAYLGRYRTIAAFMALYIVGLALLTMSASVPGMKPPNCATISASSCGPSPGQSAAFFVALYLIALGTGGIKPCVSSFGADQFDDADPREHRSKASFFNWFYMSINVGALVASSVLVWVQMNVGWGWGFGIPAVAMAVAVASFLMGSSLYRHQKPGGSPLTRMLQVVVAAARKSRVALPADAAALLYEGDKLACGTRRLAHTEQFRWLDRAAVVTPTTDKDDDTGSRWRLCPVTQVEELKAVVRLLPVWASGIVMSAVYGQMSTMFVLQGNTLDPRMGATFKIPSASLSIFDTLAVLAWVPVYDRLIVPAARRFTGHPRGFTQLQRMGIGLLISVFSMVAAGVLEVVRLRVAAAHGMLDSTSYLPISIFWQVQYFIIGQIDFFYDQAPDDMRSTCTALSLTSSALGNYLSTLLVVIVTAASTRGGGLGWIPDNLNRGHLDYFFWLLAALSAVNFLVYLWIANWYRCKTITTTEAAAQT

SEQ ID NO: 458 - DNA, 1710 bp, Populus balsamifera
  misc_feature 1..1710: note = Ceres Annot ID no. 1529287
  misc_feature 1..1710: note = Encodes the peptide sequence at SEQ ID NO. 459
  source 1..1710: mol_type = unassigned DNA; note = Populus balsamifera subsp. trichocarpa
atggcagaaactgattacacaaacaatgggacggtggatatcgaaggaaatccagctaataagaagaaaactggaaactggaagtcttgccgctttattcttgggaatgaatgctgtgagaggttggcatactacgggatgagtacgaatctagtgaactatcttggggaccgtctcaaccagggaaatgttgctgcagcaaacaatgtcaccaattggtctggaacttgctatgtcacaccactgattggagcctttctagcagattcatatttgggaagatattggacaattgcgagttttgttatcatatatatcattggaatgacactcctaacattgtctgcttcggtcactggtctgaagccatcatgtgataaggattcttgccacccgaccacaggacaaactgcagcatgctttgtagcactttacatgatcgctcttggaactggaggaatcaagccatgtgtttcatcctttggcgcagatcaatttgatgaaactgatgagaccgagaggaaaaagaaaagctccttttttaattggttttacctttcaatcaatatcggcgcgcttgttgcgtcttctgttttggtctggatacaaatgaatgttggctggggatgggggtttggagtcccagcagttgccatggctgtagcggttgtgtttttcttcttaggaagcaagctataccgaattcaaaaacctggtgggagtcccattacaaggattgtccaggttatagttgcatccttcagaaagagtaatgttcaagttcctgctgataaatctcttctttacgagactgcagaggaggaaagtcaaatccaaggaagccgcaagcttgaacataccaacaaattcaagttcttcgataaggctgctgtgaaaacccaagatgacaatataaagggcttaacaagtccatggagactctgcacagtaactcaagttgaagagctcaagtccataatcaggttgctcccagtatgggcatctggaatagtcttctcaactgtgtacagtcaaatgaacaccatgttcgttttgcaaggaaataccatggaccaacacatgggtccacatttccagattccatcagcatcgctctccctctttgatacccttagcgtcatcttctgggctcctgtatacgatcgaatcattgtcccatatgcaaggaaatttacgggtcatgaacgaggctttactcagctccaacgcatgggcattggcctcgtcatatcaattgtgtccatgatcactgctggaatattggaggttgttcggctcaactttgtccaaaagaacaattactatgatcttaagtacatcccaatgtccattttctggcaagtaccgcagtactttctcattggatgtgcagaagtttttaccttcattggacagttggagtttttctacgaccaggcaccagatgctatgagaagtttgtgctcagctctttcgcttaccactgtcgcattaggaaattacttgagcactctgcttgtcaccattgttactaaaatcacaacgagaggtgggaagctcggttggattcctgataatatgaacaggggccatcttgattacttctactggctcttggcaattctcagcttcctgaacttcattttgtatctctggatttcaaaatggtttacctacaagaaagctacagggcatcctcaacgagactga

SEQ ID NO: 459 - protein, 569 aa, Populus balsamifera
  REGION 95..496: note = Pfam Name: PTR2 Pfam Description: POT family
  REGION 1..569: note = Ceres Annot ID no. 1529287
  REGION 1..569: note = Bit score of 1172.9 for HMM based on sequences of Figure 11
  REGION 1..569: note = Functional Homolog Of SEQ ID NO. 426
  source 1..569: note = Populus balsamifera subsp. trichocarpa
MAETDYTNNGTVDIEGNPANKKKTGNWKSCRFILGNECCERLAYYGMSTNLVNYLGDRLNQGNVAAANNVTNWSGTCYVTPLIGAFLADSYLGRYWTIASFVIIYIIGMTLLTLSASVTGLKPSCDKDSCHPTTGQTAACFVALYMIALGTGGIKPCVSSFGADQFDETDETERKKKSSFFNWFYLSINIGALVASSVLVWIQMNVGWGWGFGVPAVAMAVAVVFFFLGSKLYRIQKPGGSPITRIVQVIVASFRKSNVQVPADKSLLYETAEEESQIQGSRKLEHTNKFKFFDKAAVKTQDDNIKGLTSPWRLCTVTQVEELKSIIRLLPVWASGIVFSTVYSQMNTMFVLQGNTMDQHMGPHFQIPSASLSLFDTLSVIFWAPVYDRIIVPYARKFTGHERGFTQLQRMGIGLVISIVSMITAGILEVVRLNFVQKNNYYDLKYIPMSIFWQVPQYFLIGCAEVFTFIGQLEFFYDQAPDAMRSLCSALSLTTVALGNYLSTLLVTIVTKITTRGGKLGWIPDNMNRGHLDYFYWLLAILSFLNFILYLWISKWFTYKKATGHPQRD

SEQ ID NO: 460 - DNA, 2248 bp, Panicum virgatum
  misc_feature 1..2248: note = Ceres Clone ID no. 1806748
  misc_feature 1..2248: note = Encodes the peptide sequence at SEQ ID NO. 461
  source 1..2248: mol_type = unassigned DNA
gtggcgctcctcccggtcccggccgcctcctctcctctcttccctcgtctcgcggtcgcgcccagagccgagaggaggaacaggcagggagattccacgcgcccggcagttacgataccgcgccgcagattccctcgtcgctgctcccccaagccctcccgcaccagcagcgccgccgccctccgccgccggctctccagtccagtccaggataggaggcctctgactctctgagctgcacaccatctgagcgacgccatgggagaggtcgcagacatgtacacccaagacgggaccgtcgacatgaagggcaacccggccgtgaagaagggcaccggcaactggcgcgcctgcccttacatcctcgcgaacgagtgctgcgagaggctggcgtactacagcatgagcaccaacctggtgaactacatgaagacccgcctcggccaggggaactccgtcgccgccaacaacgtcaccaactggagcggaacgtgctacatcacgccactcatcggcgcattcttggctgacgcctacatggggagatactggaccatcgccagcttcatgatcatctacatcattggcctgacgctgctgacaatggcgtcgtcggtgaaggggctggtgccgtcgtgcgacggcagcgggacgtgccacccgacggagtcgcagtcggcggcggtgttcgtggcgctgtacctgatcgcgctgggcacgggcggcatcaagccctgcgtgtcgtccttcggcgccgaccagtttgacgagaacgacgagcgggagaacaagagcaagagctccttcttcaactggttctacttctccatcaacatcggcgcgctggtggcgtcgacggtgctggtgtacgtgcagacgcacgtcggctggggctggggctttggcatccccgccgtggtgatggccatcgccgtcgtgagcttcttcgtcggcacgccgctgtaccggcaccagcgccccgggggcagcccggtcacgcgcatcgcgcaggtgctcgtcgcgtccgcgcgcaagtggagcgtggccgtgcccgccgacaaggcgcagctgcacgagacgctggacaaggagtccggcatcgagggcagccgcaagctcgagcacacggaccagttccgctgcctcgacaaggcggccgtcgtgacggcccctgacggcgcggcggcggcggcgccgagcccgtggcggctgtgcacggtgacccaggtggaggagcttaagagcgtggtccggctgctgcccatctgggcgaccgggatcgtgttcgcgacggtgtacgggcagatgagcaccatgttcgtgctgcagggcaacacgctggaccagcgcatggggccccggttcagcatcccctcggcgacgctctccatggtggacaccatcagcgtcatcatctgggtgcccatctacgaccgcctcatcgtgcccgcggcgcgctccgtcacgggccgcccgcgcgggttcacgcagctgcagcgcatgggcatcggcctcgtcatctccatcttctccatggtcgccgcgggcgtgctcgacgtcgtgcggctgcgcgccgtggcgcggcacgggctgtatggcgacaaggacacggtgcccatctccatcttctggcagatcccgcagtacttcatcatcgggtgcgccgaggtgttcaccttcgtggggcagctcgagttcttctacgaccaggctcccgacgccatgaggagcctgtgctcggcgctgtcgctcaccaccgtggcgctgggcaactacctgagcacggtgctggtgaccatcgtgacgcgcatcaccaccaggcacggcaggctcgggtggatcccggacaacctcaaccgcggccacctcgactacttcttctggctgctcgccgtgctcagcctcctcaacttcctcgtctacctgctcatcgccaggtggtacaaatacaagaagacggcggaatacccggacgccaccaaaggggagcgcaaccaggaacactgatcaagcggtggtgcagggctacatacaggctgactggacggagaagaagaagaaaaccaagtgattaaattctctctgttcggttggcttccgatttgttcgtgggagttcgcgtgtttaaacgtactagttcactgtaggtgacaggggtcgaatggattgcttagtatgtcatgtgtcagtaatatgcgcaatgcttgatctcaaatatcagtagtatctataaaataagttcagctcc

SEQ ID NO: 461 - protein, 582 aa, Panicum virgatum
  REGION 97..501: note = Pfam Name: PTR2 Pfam Description: POT family
  REGION 1..582: note = Ceres Clone ID no. 1806748
  REGION 1..582: note = Bit score of 1204.3 for HMM based on sequences of Figure 11
  REGION 1..582: note = Functional Homolog Of SEQ ID NO. 426
MGEVADMYTQDGTVDMKGNPAVKKGTGNWRACPYILANECCERLAYYSMSTNLVNYMKTRLGQGNSVAANNVTNWSGTCYITPLIGAFLADAYMGRYWTIASFMIIYIIGLTLLTMASSVKGLVPSCDGSGTCHPTESQSAAVFVALYLIALGTGGIKPCVSSFGADQFDENDERENKSKSSFFNWFYFSINIGALVASTVLVYVQTHVGWGWGFGIPAVVMAIAVVSFFVGTPLYRHQRPGGSPVTRIAQVLVASARKWSVAVPADKAQLHETLDKESGIEGSRKLEHTDQFRCLDKAAVVTAPDGAAAAAPSPWRLCTVTQVEELKSVVRLLPIWATGIVFATVYGQMSTMFVLQGNTLDQRMGPRFSIPSATLSMVDTISVIIWVPIYDRLIVPAARSVTGRPRGFTQLQRMGIGLVISIFSMVAAGVLDVVRLRAVARHGLYGDKDTVPISIFWQIPQYFIIGCAEVFTFVGQLEFFYDQAPDAMRSLCSALSLTTVALGNYLSTVLVTIVTRITTRHGRLGWIPDNLNRGHLDYFFWLLAVLSLLNFLVYLLIARWYKYKKTAEYPDATKGERNQEH

SEQ ID NO: 462 - DNA, 1794 bp, Glycine max
  misc_feature 1..1794: note = Ceres Annot ID no. 8755095
  misc_feature 1..1794: note = Encodes the peptide sequence at SEQ ID NO. 463
  source 1..1794: mol_type = unassigned DNA
atggcctgcttagaagtcagcaaagagggaaagttcaaaggtgacacagaagaactcactcttgatggaagtgttgattggcatggtcgcccagcaatcagagccaaatctggcagatgggttgctggaaccatcgttctattgaaccaaggtctggcaaccttagcattctttggagtaggggttaacctagtgctgttcctgacaagagtgatggggcaaaataatgctgcagctgcaaacagtgtgagcaaatggactggcacagtttacatcttctctctagtgggtgctttcctaagtgattcttattggggaagatacaaaacttgtgccatctttcaggtcatctttgtaataggtctagtatcattgtccctttcatcatacctctccttgattaggcctaaaggttgtgggaatgaaacaattccatgtgggaagcattcaagcttggagatggggatgttctacctctcaatttatctcattgctttagggaatggagggtatcagccaaatattgccacatttggagctgaccagtttgacgaggagcactcaaaggagggttactcaaaggttgccttctttagctacttctacctggctttgaaccttggttcactcttctcaaacacaattctaggctattttgaagatgaaggactgtgggctctagggttctgggtgtctgcaggctctgcttttgccgcccttgtcttgtttcttcttgggaccccacgatatagacacttcaaacccagtggcaatcctctttcaaggttcagccaagtccttgttgctgcatcaaggaaatggagagctcaaatgacatcaaatggagaggacctatatgtcatggatgaaaatgaatctcccaccaatggcaacaggaagattctccacacaggcgggttcaaatttctggatagagcagcgtttatatctcccagagatctagaagaccaaaagagtggggtttacaacccctggcgtctctgccctataactcaagttgaagaagtgaagtgcatactaagacttcttccaatttggctctgcaccataatatactcagtggttttcacacaaatggcttctctttttgtggagcaaggggctgccatgaaaactacaatttccaatttcagaataccacctgcaagcatgtctagctttgacatcctcagtgtagctgtcttcattttcttctaccgtcgagtgattgatccacttgttggaagacttaaaaagaaaagttccaggggacttactgagcttcaaagaatgggaattgggcttgttatagctgtaatggctatggtttcagctggaatagttgaatgctacagacttaagtatgcaaactcaggatgcccccactgcagtggcacaagctctctaagcatcttctggcaaattcctcagtacgcacttattggagcttcagaggtttttatgtatgtaggccagttagagttcttcaatgctcagacgccagatggcttaaagagctttggaagtgccctttgcatgacgtccatctctcttgggaactacgtaagtagcatacttgttagtatagttatgaagatctccaccgaggatcacatgccagggtggatccctggaaacttaaatagaggtcacctagataggttttatttcctcttagctatcttgacatcaatagacttggtcctttatattgcatgtgcaaagtggttcaagagtatacagttggaagggaaatatgaagagaatgatatgcctggtagctttaaagtctaa

SEQ ID NO: 463 - protein, 597 aa, Glycine max
  REGION 108..516: note = Pfam Name: PTR2 Pfam Description: POT family
  REGION 1..597: note = Ceres Annot ID no. 8755095
  REGION 1..597: note = Bit score of 1276.1 for HMM based on sequences of Figure 11
  REGION 1..597: note = Functional Homolog Of SEQ ID NO. 426
MACLEVSKEGKFKGDTEELTLDGSVDWHGRPAIRAKSGRWVAGTIVLLNQGLATLAFFGVGVNLVLFLTRVMGQNNAAAANSVSKWTGTVYIFSLVGAFLSDSYWGRYKTCAIFQVIFVIGLVSLSLSSYLSLIRPKGCGNETIPCGKHSSLEMGMFYLSIYLIALGNGGYQPNIATFGADQFDEEHSKEGYSKVAFFSYFYLALNLGSLFSNTILGYFEDEGLWALGFWVSAGSAFAALVLFLLGTPRYRHFKPSGNPLSRFSQVLVAASRKWRAQMTSNGEDLYVMDENESPTNGNRKILHTGGFKFLDRAAFISPRDLEDQKSGVYNPWRLCPITQVEEVKCILRLLPIWLCTIIYSVVFTQMASLFVEQGAAMKTTISNFRIPPASMSSFDILSVAVFIFFYRRVIDPLVGRLKKKSSRGLTELQRMGIGLVIAVMAMVSAGIVECYRLKYANSGCPHCSGTSSLSIFWQIPQYALIGASEVFMYVGQLEFFNAQTPDGLKSFGSALCMTSISLGNYVSSILVSIVMKISTEDHMPGWIPGNLNRGHLDRFYFLLAILTSIDLVLYIACAKWFKSIQLEGKYEENDMPGSFKV

SEQ ID NO: 464 - protein, 592 aa, Vitis vinifera
  REGION 109..517: note = Pfam Name: PTR2 Pfam Description: POT family
  REGION 1..592: note = Public GI ID no. 147827175
  REGION 1..592: note = Bit score of 1308.0 for HMM based on sequences of Figure 11
  REGION 1..592: note = Functional Homolog Of SEQ ID NO. 426
  UNSURE 577: note = X is any aa, unknown, or other
MGINLEVSKEVKFKAGEEACTLDGTVDCRGNPAIRSRSGKWFAGIIILLNQGLATLAFFGVGVNLVLFLTRVLQQNNADAANNVSKWTGTVYIFSLVGAFLSDSYWGRYKTCAIFQVIFVIGLVSLSLSSYIFLVKPEGCGNEDSPCPSHSSLEIGLFYLSIYLVALGNGGYQPNIATLGADQFDEEDPKEGHSKVAFFSYFYLALNLGSLFSNTILSYLEDEGMWALGFWVSAGSAFLALILFLGGTPRYRHFKPSGNPLSRFCQVMVAAMRKFRVEMPPSAEDLYEGDGKECSNNSIRRILHTDGFKFLDRAAFISSKDSDNQEQGFYNQWRLCPITQVEEVKCILRLIPIWLCTIIYSVVFTQMASLFVEQGAAMKTTVSNFRIPPASMSSFDILSVAAFIFLYRRVLDPLVGRIRKTDTKGLTELQRMGIGLIIAIIAMIAAGIVECYRLKYAQKDCTNCEGSSSLSIFWQVPQYAFIGASEVFMYVGQLEFFNAQTPDGLKSFGSALCMTSISLGNYVSSLLVTMVMKISTEDHMPGWIPGNLNKGHLDRFYFLLATLTALDLVVYVACAKXYKCIKMEBRANEYGV

SEQ ID NO: 465 - DNA, 2631 bp, Panicum virgatum
  misc_feature 1..2631: note = Ceres Clone ID no. 1888865
  misc_feature 1..2631: note = Encodes the peptide sequence at SEQ ID NO. 466
  source 1..2631: mol_type = unassigned DNA
acctcgtccgcctcgttggctccgcaccgctgcatctctctagagacaaaggcaggccgcgtgctcccctgcgtagtccttcgagcaggtacgagcggcctcctcctccgtcttcttgattccgccatggcttctgcagcagtagaggggtggagattccggcggtttctgaatcttcttgtttctgtgctttatgagttatgagtatggttggtaatggcgtccgcttgctagtggccactatgctgaaaaattgggcgagcctttagtgttcagaactcgatgaccaacttctaggagttaggtctgcctcaaattcagatccccccactttgtttgtgtggattactgaagtggccaataatttgagcaatttgtccattttttccctcgactaacttgtgccaacaaaaaatgtttttttcttgaagaaatttgatgtctgtatttgagtcgttaaatcgtgtcccatttatattgtttctattctgatgcaaatccacgcctagtcacaatctctgaaatttcaaggcttcttgtgcacacttgctccgtttattgacatctaggactatcacactgaatcttcagtaacagtatcgttgtatgctcgcaggacaggaggcctctgattctctgagcttgtacaccatctgagcgacgccatgggagaggttgcagacatgtacacccaagacgggaccgtcgacatgaaggggaaccccgccgtgaagaagggcaccggcaactggcgcgcctgcccttacatcctcgcgaatgagtgctgcgagaggctggcgtactatggcatgagcaccaacctggtgaactacatgaagacccgcctcggccaggggaactctgtcgccgccaacaatgtcaccaactggagcggaacgtgctacatcacgccactcatcggcgcattcttggctgacgcctacatggggagatactggaccatcgcgagcttcatgatcatctacatcattggcctggcgctgctgacgatggcgtcgtcggtgaaggggctggtgccgtcgtgcgacagcagcgggacgtgccacccgacggagtcgcagtcggcggcagtgttcgtggcgctgtacctgatcgcgctgggcacgggcgggatcaagccctgcgtgtcatcctttggcgccgaccagttcgacgagaacgacgagcgggagcagaagagcaagagctccttcttcaactggttctacttctccatcaacatcggcgcgctggtggcgtcgacggtgctggtgtacgtgcagacgcacgtcggctggggctggggcttcggcatccccgccgtggtgatggccatcgccgtcgtcagcttcatcatcggcacgccgctgtaccggcaccagcgccccgggggcagcccgatcacgcgcatcgcgcaggtgctcgtcgcgtccgcgcgcaagtggagcgtggccgtgcccgccgacaaggcgcagctgcacgagacgctggacaaggagtccggcatcgagggcagccgcaagctagagcacacggaccagttcagctgcctcgacaaggcggccgtcgtgacggccaaggacggggcggcggtgagcccgtggcggctgtgcacggtgacgcaggtggaggagctcaagagcgtggtgcggctgctgcccatctgggcgaccgggatcgtgttcgcgacggtgtacgggcagatgagcaccatgttcgtgctgcagggcaacacgctggaccagcgcatgggccccaggttcagcatcccctcggcgacgttgtccatggtggacaccatcagcgtcatcatctgggtgcccatctacgaccgcgccatcgtgcccttcgtgcggtccgtgacggggcgcccgcgcgggttcacgcagctgcagcgcatgggcatcggcctcgtgatctccatcttctccatggtggcggcgggcgtgctcgacgtggtgcggctgcgcgccgtggcgcggcacggcctgtacggcgacaaggacacggtgcccatctccatcttctggcagatcccgcagtacttcatcatcgggtgcgcggaggtgttcaccttcgtggggcagctggagttcttctacgaccaggcgcccgacgccatgaggagcctgtgctcggcgctgtcgctcaccaccgtggcgctgggcaactacctgagcacggtgctggtgaccatcgtgacgcgcatcaccaccacgcacggcaggctcgggtggatcccggacaacctcaaccgcggccacctcgactacttcttctggctgctcgccgtgctcagcctcctcaacttcctcgtctacctggtcatcgccaagtggtacaagtacaagaagacggcggaatacccggacgccaaaggcggggagcacaactgatgaagcggtgcagggcagggctgcaggctgactgaacggacaaggcgaaaacgaagtgatttctctgtctgtgtggttggctctttcggtttgtttgtgagagttcgccgcgtgtttaaacgtagcagttcactgtaggtgacagggtcgaatgaattgtttagtatgtcatgtgtcagtaatacgcgcaatgcttgatcccaactatcagtatctataaaataagttcagctcc

SEQ ID NO: 466 - protein, 576 aa, Panicum virgatum
  REGION 97..498: note = Pfam Name: PTR2 Pfam Description: POT family
  REGION 1..576: note = Ceres Clone ID no. 1888865
  REGION 1..576: note = Bit score of 1202.6 for HMM based on sequences of Figure 11
  REGION 1..576: note = Functional Homolog Of SEQ ID NO. 426
MGEVADMYTQDGTVDMKGNPAVKKGTGNWRACPYILANECCERLAYYGMSTNLVNYMKTRLGQGNSVAANNVTNWSGTCYITPLIGAFLADAYMGRYWTIASFMIIYIIGLALLTMASSVKGLVPSCDSSGTCHPTESQSAAVFVALYLIALGTGGIKPCVSSFGADQFDENDEREQKSKSSFFNWFYFSINIGALVASTVLVYVQTHVGWGWGFGIPAVVMAIAVVSFIIGTPLYRHQRPGGSPITRIAQVLVASARKWSVAVPADKAQLHETLDKESGIEGSRKLEHTDQFSCLDKAAVVTAKDGAAVSPWRLCTVTQVEELKSVVRLLPIWATGIVFATVYGQMSTMFVLQGNTLDQRMGPRFSIPSATLSMVDTISVIIWVPIYDRAIVPFVRSVTGRPRGFTQLQRMGIGLVISIFSMVAAGVLDVVRLRAVARHGLYGDKDTVPISIFWQIPQYFIIGCAEVFTFVGQLEFFYDQAPDAMRSLCSALSLTTVALGNYLSTVLVTIVTRITTTHGRLGWIPDNLNRGHLDYFFWLLAVLSLLNFLVYLVIAKWYKYKKTAEYPDAKGGEHN

SEQ ID NO: 467 - protein, 569 aa, Vitis vinifera
  REGION 96..498: note = Pfam Name: PTR2 Pfam Description: POT family
  REGION 1..569: note = Public GI ID no. 157337163
  REGION 1..569: note = Bit score of 1128.1 for HMM based on sequences of Figure 11
  REGION 1..569: note = Functional Homolog Of SEQ ID NO. 426
MAEEDNYTKDGTINYQGNPANKKKTGTWTACPYILGNEFCERLAYYGMSSNLVLYFKYKLHQDSATASKNVLNWSGTCYLTPFIGAFLADAYLGRYWTIASFSIIYVIGMTLLTVTASVPGLKPNCSPSGVCDPTETQTAVCFLALYLVALGTGGIKPCVSSYGADQFDDTDEHEKTHKSSFFNWFYLSINVGALIAGSILVWIQENIGWGVGFGIPAAAMAIAVVSFFSGTRLYRNQKPGGSPLTRMSQVVVASLKKYRVQVPADKSLLYEIADGESGIQGSRKLDHTKDLSFFDKAAVEIQSDHIKDSPDPWKICTVTQVEELKAIIRLLPVWATGIIFSAVYSQMGSLFVVQGESMDPHMGRHFEIPSASLSIFDTISVIFWVPIYDRIIVPVARKFTGHSNGITQLQRMGIGLFISIFAMLSAGILEVVRLGIVKRHNYYDHDRIPLSIFYQVPQYFIIGCAEVFTFIGQLEFFYEQAPDAMRSFCSALSLATVALGNYLSSLLVTIVTDVSTRGGKLGWIPDNLNRGHLHYFFFLLAILSVLNLVAFLFVAKWYTYKRAVGTLR

SEQ ID NO: 468 - protein, 580 aa, Oryza sativa
  REGION 98..500: note = Pfam Name: PTR2 Pfam Description: POT family
  REGION 1..580: note = Public GI ID no. 115434472
  REGION 1..580: note = Bit score of 1204.4 for HMM based on sequences of Figure 11
  REGION 1..580: note = Functional Homolog Of SEQ ID NO. 426
  source 1..580: note = Oryza sativa subsp. japonica
MGEVAEDIYTQDGTVDVKGNPATKKNTGNWRACPYILANECCERLAYYGMSTNLVNYMKTRLGQESAIAANNVTNWSGTCYITPLLGAFLADAYMGRFWTIASFMIIYILGLALLTMASSVKGLVPACDGGACHPTEAQTGVVFLALYLIALGTGGIKPCVSSFGADQFDENDEGEKRSKSSFFNWFYFSINIGALVASSVLVYVQTHVGWGWGFGIPAVVMAVAVASFFVGTPLYRHQRPGGSPLTRIAQVLVASARKWGVEVPADGSRLHETLDRESGIEGSRKLEHTGQFACLDRAAVETPEDRSAANASAWRLCTVTQVEELKSVVRLLPIWASGIVFATVYGQMSTMFVLQGNTLDASMGPHFSIPAASLSIFDTLSVIVWVPVYDRLIVPAVRAVTGRPRGFTQLQRMGIGLVISVFSMLAAGVLDVVRLRAIARHGLYGDKDVVPISIFWQVPQYFIIGAAEVFTFVGQLEFFYDQAPDAMRSMCSALSLTTVALGNYLSTLLVTIVTHVTTRNGAVGWIPDNLNRGHLDYFFWLLAVLSLINFGVYLVIASWYTYKKTADSPDDKAEHAGAN

SEQ ID NO: 469 - DNA, 1833 bp, Oryza sativa
  misc_feature 1..1833: note = Ceres Annot ID no. 6252512
  misc_feature 1..1833: note = Encodes the peptide sequence at SEQ ID NO. 470
  source 1..1833: mol_type = unassigned DNA
atgtctggcaacgacggagacatgaagatgagggtgatcgtcgtggaaggcgatgagacgagtaacgccccgaaggatgtatgctgcgagtacaccctcgatggctccgtggatatcaagggctcaccggcggtgaagggcaagtccggcggatggctcgccggcggccttattcttctgaaccagggtctggcaaccctggcgttcttcggggtaaacgtgaacctggtgttgttcctgacgagggtgctgcagcagagcaacggcgacgccgccaacaacgtgagcaaatggaccggcacggtttacatgttctccctcatcggcgccttcctcagcgactcctactggggccgctacaagacctgcgccatattccaggccatctttgtccttggcctcgcgctgctgtccctgtcgtcgcggctgtacctgatcaggccggtcgggtgcggcacggagcacgtgccctgcgagccgcactccggcgcggagctggggatcttctacatcgcgctgtacatgatcgcgttcggcaacggcgggtaccagcccaacgtcgccaccttcggcgccgaccagttcgacggcgaggacccggccgagtcgcactccaaggtctccttcttcagctacttctacctggcgctcaacctcggctcgctcttctccaacaccttcctcagcttcctcgaggacgagggcaactgggcgctcggcttctgggtctccaccgccgccgcggccaccgcgctgctgctgttcctcggcggcacgctccgctaccggtacatccgccccagcggcaacccggttggcaggatcttccaggtcgcgttcgccgcgtgcaggaactggaaggccggcgagtcgccgggcgccgtgacactctacgagagcgacgagaaggcggattccggtgggaggaagctcctgcacacggaaggtttcaggttcttggaccgtgcggcggtggtgggcgctaacccgaagcttggcacgtgcacccaaccgcgtgacccctggaagctgtgcacggtgacgcaggtggaggaggtgaagagcatcctgcggctcctccccatctggctctgcaccatcctctattcggtcgtgttcacgcagatggcgtcgctgttcgtcgtgcagggcgccgcgatgcgccgcaccacccggttcccgggcttctccgtcccgccctccagcatgtcggccttcgacatcctcaccgtcgccaccaccatcttcctgtaccgccgggccgtctgcccgctcgtgtcgcggctcacgggccgccacaccggcccaaccgagctgcagaggatgggcctcggcctggtgctcggcgcgatggccatggccaccgccggcacggtcgagcacttcaggaaggccggcgccaccacggcgatgagcagcgacctgcacatcatgtggcaggtgccgcagtacgcgctgatcggcgtgtcggaggtgatgatgtacgtcggccagctcgagttcttcaacggggagatgcccgacgcgctcaagagcttcgggagcgcgctctgcatgatgtccatgtcgctcggcaactacttcagcgacgtcatcgtgagcgcggtgaccaaggccaccgccgtgcgcggccgccccggctggatccccgccgaccttaacgagggccacctcgacaagttcttcttcctgctcgccgtgctggccgtcgcggacttcgccgtgtacctcgtgtgcgcgagccggtacaggagtggcacggtggacgtcgaccggagcgacggggaggaggaggatggcgtggccggcaggcagatggcggcaacggtgtaa

SEQ ID NO: 470 - protein, 610 aa, Oryza sativa
  REGION 120..522: note = Pfam Name: PTR2 Pfam Description: POT family
  REGION 1..610: note = Ceres Annot ID no. 6252512
  REGION 1..610: note = Bit score of 1214.3 for HMM based on sequences of Figure 11
  REGION 1..610: note = Functional Homolog Of SEQ ID NO. 426
MSGNDGDMKMRVIVVEGDETSNAPKDVCCEYTLDGSVDIKGSPAVKGKSGGWLAGGLILLNQGLATLAFFGVNVNLVLFLTRVLQQSNGDAANNVSKWTGTVYMFSLIGAFLSDSYWGRYKTCAIFQAIFVLGLALLSLSSRLYLIRPVGCGTEHVPCEPHSGAELGIFYIALYMIAFGNGGYQPNVATFGADQFDGEDPAESHSKVSFFSYFYLALNLGSLFSNTFLSFLEDEGNWALGFWVSTAAAATALLLFLGGTLRYRYIRPSGNPVGRIFQVAFAACRNWKAGESPGAVTLYESDEKADSGGRKLLHTEGFRFLDRAAVVGANPKLGTCTQPRDPWKLCTVTQVEEVKSILRLLPIWLCTILYSVVFTQMASLFVVQGAAMRRTTRFPGFSVPPSSMSAFDILTVATTIFLYRRAVCPLVSRLTGRHTGPTELQRMGLGLVLGAMAMATAGTVEHFRKAGATTAMSSDLHIMWQVPQYALIGVSEVMMYVGQLEFFNGEMPDALKSFGSALCMMSMSLGNYFSDVIVSAVTKATAVRGRPGWIPADLNEGHLDKFFFLLAVLAVADFAVYLVCASRYRSGTVDVDRSDGEEEDGVAGRQMAATV

SEQ ID NO: 471 - DNA, 1770 bp, Medicago truncatula
  misc_feature 1..1770: note = Ceres Annot ID no. 1569074
  misc_feature 1..1770: note = Encodes the peptide sequence at SEQ ID NO. 472
  source 1..1770: mol_type = unassigned DNA
atggaaggaaatgagaattacagagaagaggttgttatggaagaaagtggcagagcgaatgagaataaaaaaggaggaaccaaagttgcaaccctcttgttagtgaatcaagcactggctactttagctttctttggagttggagtgaacttggttctgttcctaactagagttcttggtcaagacaatgccgaagctgctaataatgtgagcaagtggacaggaaccgtttacatgttctcattggttggagcatttctcagtgactcttattggggtcgatacttaacctgcacaatctttcaacttttctttgttctcggattggcactgtcatgtttgtcatcatggcgttttttgatcaacccaagtggatgtggtaatggccatattccttgtaagccatcatcaattggagttagcattttctacttttctatatatcttgttgcatttggttatggaggacaccaaccaaccttagcaacctttggagctgaccaatatgatgagaggaatccaaaagagaggagtttaaaagtagctttcttctgttatttttacttttccctcaacgttggatctttgttctccaatactgtattggtctattatgaggacacggggaagtggacaatgggtttctttatatcattgatctctgctatcatagcccttttgacatttttatcaggatctcctaaatatagatacttgaagccatcaggaaaccctgtcgtaagggttgctcaggtttttacagctgctgctaggaaatgggatgttgctccagccaaggcagacaaactttttgaggttctgggttctagatctgccatcaaaggttgtagaaagattctgcacagtgatgattttcgattgatggacaaagctgcaaccattacaaagaatgatgatgagcagattggaaacaatccatggaagctttgcacagtgactcaagttgaggaaacaaaatgcgtgttaagaatgcttccaatttggctatgcaccatttgttactctgttgtatttacacaaatggcatcactatttgttgagcaaggggatgtgatgaactctaacatcggagaatttcatttgccagcagccagcatgtctgtgtttgacatctgtagtgtgctagtatgcactgtaatatatcgcacaatccttgttccgttagtaggaagattgattggtaatacaaggggaattagtgaacttgaaagaatgggaattgggttaataattgcaatgttgtcaatggttgcatcaggtatgacagagatggtaaggctgagaaatataattcctgggcagaaaagaagttcaatgagtatattctatcaaattccacagtatgttctgattggtgcttcagaggttttcatgtatgtgggtcaattggagttctttaatggtcaagcaccagatggaataaaaagttttgggagttcactttgtatggcttcaatttctcttggaaactatgtgagtagcatgcttgttcacgtggtcatgaaaatcactgcaagagggaatgacaaaggttggattccagagaacctaaacaaagggcacatggataggtttttctttcttctagcagggctagttgtttttgattttgtgatttacttgttctgtgctaagtggtacaagagtatcaatgttcaaggtgaccaagaggagttggatgatgatgatgctcaagttattataattaagtcggcatccaaagaccaacctttaacaccacaagaataa

SEQ ID NO: 472 - protein, 589 aa, Medicago truncatula
  REGION 95..493: note = Pfam Name: PTR2 Pfam Description: POT family
  REGION 1..589: note = Ceres Annot ID no. 1569074
  REGION 1..589: note = Bit score of 1140.5 for HMM based on sequences of Figure 11
  REGION 1..589: note = Functional Homolog Of SEQ ID NO. 426
MEGNENYREEVVMEESGRANENKKGGTKVATLLLVNQALATLAFFGVGVNLVLFLTRVLGQDNAEAANNVSKWTGTVYMFSLVGAFLSDSYWGRYLTCTIFQLFFVLGLALSCLSSWRFLINPSGCGNGHIPCKPSSIGVSIFYFSIYLVAFGYGGHQPTLATFGADQYDERNPKERSLKVAFFCYFYFSLNVGSLFSNTVLVYYEDTGKWTMGFFISLISAIIALLTFLSGSPKYRYLKPSGNPVVRVAQVFTAAARKWDVAPAKADKLFEVLGSRSAIKGCRKILHSDDFRLMDKAATITKNDDEQIGNNPWKLCTVTQVEETKCVLRMLPIWLCTICYSVVFTQMASLFVEQGDVMNSNIGEFHLPAASMSVFDICSVLVCTVIYRTILVPLVGRLIGNTRGISELERMGIGLIIAMLSMVASGMTEMVRLRNIIPGQKRSSMSIFYQIPQYVLIGASEVFMYVGQLEFFNGQAPDGIKSFGSSLCMASISLGNYVSSMLVHVVMKITARGNDKGWIPENLNKGHMDRFFFLLAGLVVFDFVIYLFCAKWYKSINVQGDQEELDDDDAQVIIIKSASKDQPLTPQE

SEQ ID NO: 473 - DNA, 1647 bp, Populus balsamifera
  misc_feature 1..1647: note = Ceres Annot ID no. 1475845
  misc_feature 1..1647: note = Encodes the peptide sequence at SEQ ID NO. 474
  source 1..1647: mol_type = unassigned DNA; note = Populus balsamifera subsp. trichocarpa
atggcagaagatggctctaccaaagatggagcagcagatttccgaaatgaatgctgcgaaaggttggcctactatggaatcaacacaaatctagttaattacctcaaatttcaactaaaccagagcaatgttgtggcggtcaataacgtcaccaattggtcaggaacatgctatgtcatgccattgcttggagcttttcttgctgatgcctacttgggaagatattggacaattgctagtttctctataatctatgtctttggaatgacattgttgacattgtcagcatcgatccatggactaaaaccatcttgcgacagaacgaatgtttgccatacaacagggttgcagacatcagttttctttctaggcctataccttatagccctggggactggagggatcaagccttgtgtctcttcctttggtgcggatcaattcgatgactctgacgaggatgagaagaaaaggaagagttccttcttcaattggttctatttttcaatcaatatcggcgctcttattgctgcttctgtgcttgtttggatacaaaccaatgtaggctggggctggggctttggcatcccagcagtggcaatggcaattgctgttgtgagtttcttttcaggtacacggttatacaggaaccagagacttggagggagtcccttaacacgaatgtgccaagtgctagttgcatccttcaggaaattccgtgtcgaagtgcctaatgacaagtctcttctgtttgagacagcagaccatgaatctgctgtcatgggaagccgcaaacttgaccacacagatcagttaagtttctttgacaaggcagcagtggagactccatcagaccgtctaaaagggtccgcgaatcagtggaaactgtgcaccgtgactcaggttgaagagctcaagtccatcattcggttgcttcctgtatgggcaactggcataatattttctgctgtatacagtcaaatgggaaccttatttgtcctgcagggaaacacaatggaccttcgcatgggcaaatccttcgaaatcccttctgcttcactctccctctttgacacaattagtgtaatcttctgggtaccgatttacgaccgtgccatcgtgccctttgcaagaagatttactggacacaagaatggattcacacagcttcaaagaattgcaattggccttgtaatttccatctttgccatgttggttgctgggactctagagcttgtgaggctccgcgaggtcagaaaacataactactatgaactaaagcacataccaatgtccatattttggcaggtccctcagtatttcattataggatgtgcagaagttttcacatttatcgggcaattagagttcttttatgagcaggcacccgatgccatgaggagcctttgctcagctctctcactcacaaccgctgcacttgggaactacttgagcacattcctagttaatattgtcacggatatgagcaccaggcatggtaagcctggttggataccggacaatttgaatcatggccatcttcattattttttctggctcttggcagtgttgagtgtgctcaacttgggggtctatcttttggttgccagatggtacacttacaagaaagctgtggtgtccagtgattga

SEQ ID NO: 474 - protein, 548 aa, Populus balsamifera
  REGION 75..477: note = Pfam Name: PTR2 Pfam Description: POT family
  REGION 1..548: note = Ceres Annot ID no. 1475845
  REGION 1..548: note = Bit score of 1063.0 for HMM based on sequences of Figure 11
  REGION 1..548: note = Functional Homolog Of SEQ ID NO. 426
  source 1..548: note = Populus balsamifera subsp. trichocarpa
MAEDGSTKDGAADFRNECCERLAYYGINTNLVNYLKFQLNQSNVVAVNNVTNWSGTCYVMPLLGAFLADAYLGRYWTIASFSIIYVFGMTLLTLSASIHGLKPSCDRTNVCHTTGLQTSVFFLGLYLIALGTGGIKPCVSSFGADQFDDSDEDEKKRKSSFFNWFYFSINIGALIAASVLVWIQTNVGWGWGFGIPAVAMAIAVVSFFSGTRLYRNQRLGGSPLTRMCQVLVASFRKFRVEVPNDKSLLFETADHESAVMGSRKLDHTDQLSFFDKAAVETPSDRLKGSANQWKLCTVTQVEELKSIIRLLPVWATGIIFSAVYSQMGTLFVLQGNTMDLRMGKSFEIPSASLSLFDTISVIFWVPIYDRAIVPFARRFTGHKNGFTQLQRIAIGLVISIFAMLVAGTLELVRLREVRKHNYYELKHIPMSIFWQVPQYFIIGCAEVFTFIGQLEFFYEQAPDAMRSLCSALSLTTAALGNYLSTFLVNIVTDMSTRHGKPGWIPDNLNHGHLHYFFWLLAVLSVLNLGVYLLVARWYTYKKAVVSSD

SEQ ID NO: 475 - DNA, 1929 bp, Populus balsamifera
  misc_feature 1..1929: note = Ceres Annot ID no. 1501483
  misc_feature 1..1929: note = Encodes the peptide sequence at SEQ ID NO. 476
  source 1..1929: mol_type = unassigned DNA; note = Populus balsamifera subsp. trichocarpa
atggaaggcatgaccaaggttgtggcaaacactcttctaaggagacctctcttccctgttccattttccacccatattttcttctttaatggcaacaacaaaagaaaatattctattgctgctatggattcagacccttccaccgattatgtgacaggagaaagtgtcatctctagagaaaatgtagctgtgaacagaatcagaactgaggaagaacacgatattgctagcaataagcgctccattacttggaagagctctggagggtggaaagctgcaagcatcttgctagcaaatcaatgcctggctacactagctttctttggagttggtgtgaatttggttctgttcttaacaagagttcttggtcaaagtaatgctgatgctgccaatagtgtcagcaagtggactggcacagtttatctgtgctcactcataggagctttcctcagtgattcatactggggcagatacttgacctgtgcagtctttcagttaatattcgtttcggggttggcgctcgtatcggtatcatcttgttatttcttgatcaaaccagatggatgtggtgatggagaattagcctgtgagccaacatcgtcggtgggagtggctattttttacttggctatatatttagttgcctttggatatggtgggcatcaaccttctttagccacatttggagcagaccaatttgacgagtcgaaaccgaaagaaaaaaattacaaggcagcttacttttgctatttctattttgcactcaactttggatctctattctcaaacactattttggtgtattttgaggatcatggaaaatggacactaggtttcctggtgtcattaggctctgcagttttagccttggtatcgttcttgtttgggacacctggttaccagtatgtgaaaccttgcggcaaccctttgccgcgagttgctcaggtgtttgtggctgcagttaagaaatgggatgttatcccggcgaaagctgatgaactttatgaagtggaaggaccagaatctgctatcaaagggagcagaaagattcttcatagtgatgattttgagtttttggacaaggcagcaacagtaacagaggatgatctaagtcaccaaaagaatccatggaggctttgcacaataagtcaagtagaggaagctaaatgtgttcttaaaatgttacctatttggctatgcactataatttactctgttgttttcacacaaatggcctccctctttgttgagcaaggagatgtcatgaactcctatgctggaaagtttcacctaccagcagctagcatgtctgcctttgatatctgcagtgtccttgtttgcactgggatttatcgccaaatcctcgtgccattagctggaaggttaagtggtaataccaaggggttaacggagcttcagagaatgggaatcggactcatcattgggatgctagcaatgttcgcagcaggggctactgagattgaaaggctcaagcatgttactgaagggaaaaaagttagctcactaagcatattttggcaaattccacaatacgttcttgtcggtgcatctgaggttttcatgtatgtaggccagttggagttctttaacgggcaagcaccagacgggattaagagttttggaagctcactttgcatggcttcaatctcccttggcaactatgtcagcagcatgctagtcagcatggtgatgaagattacagctaaaggtgacaagcctggatggatcccagatgacttgaacacaggccacatggacaggttctacttcctgattgcagtcttaacagcctttgattttgtgatttacttgttctgtgccaactggtacacgcctatcaacattgatgacagccacggaggaattgggatggaaaagcaagaagatgatgcgcttgcaagagtttaa

SEQ ID NO: 476 - protein, 601 aa, Populus balsamifera
  REGION 117..515: note = Pfam Name: PTR2 Pfam Description: POT family
  REGION 1..601: note = Ceres Annot ID no. 1501483
  REGION 1..601: note = Bit score of 1181.1 for HMM based on sequences of Figure 11
  REGION 1..601: note = Functional Homolog Of SEQ ID NO. 426
  source 1..601: note = Populus balsamifera subsp. trichocarpa
MDSDPSTDYVTGESVISRENVAVNRIRTEEEHDIASNKRSITWKSSGGWKAASILLANQCLATLAFFGVGVNLVLFLTRVLGQSNADAANSVSKWTGTVYLCSLIGAFLSDSYWGRYLTCAVFQLIFVSGLALVSVSSCYFLIKPDGCGDGELACEPTSSVGVAIFYLAIYLVAFGYGGHQPSLATFGADQFDESKPKEKNYKAAYFCYFYFALNFGSLFSNTILVYFEDHGKWTLGFLVSLGSAVLALVSFLFGTPGYQYVKPCGNPLPRVAQVFVAAVKKWDVIPAKADELYEVEGPESAIKGSRKILHSDDFEFLDKAATVTEDDLSHQKNPWRLCTISQVEEAKCVLKMLPIWLCTIIYSVVFTQMASLFVEQGDVMNSYAGKFHLPAASMSAFDICSVLVCTGIYRQILVPLAGRLSGNTKGLTELQRMGIGLIIGMLAMFAAGATEIERLKHVTEGKKVSSLSIFWQIPQYVLVGASEVFMYVGQLEFFNGQAPDGIKSFGSSLCMASISLGNYVSSMLVSMVMKITAKGDKPGWIPDDLNTGHMDRFYFLIAVLTAFDFVIYLFCANWYTPINIDDSHGGIGMEKQEDDALARV

SEQ ID NO: 477 - DNA, 1821 bp, Populus balsamifera
  misc_feature 1..1821: note = Ceres Annot ID no. 8755079
  misc_feature 1..1821: note = Encodes the peptide sequence at SEQ ID NO. 478
  source 1..1821: mol_type = unassigned DNA; note = Populus balsamifera subsp. trichocarpa
atggattcgttctcttccaccaacgctgtgctaaagaagcaggtgacaggagaaagtagtatcatctctagggaaaatgtagctgtgaagagaatcagaactgaggaagaacaggagattgctaacagaaagccttcccttatttggaagagaactggagggtggacagctgcaagcatcttgctagcaaatcaatgcctggctacactagctttctttggagttggtgtgaatttggttctattcttaacaagagttcttggtcaaagtaatgctgatgctgccaataatgtcagcaagtggactggcacagtttatctgtgctcactcgtaggagctttcctcagtgattcatactggggtagatacttgacctgtgcaatctttcagctaatattcgtctcgggattggtgctcgtatcggtatcatcttggtttttcttgatcaaaccagatggatgtggtgatggaaaattaacctgtgtgccggcaacatcgatgggacaagttgttttctacttggctatatacttagtagcctttggatatggtggacatcaaccttccatagcgacatttggagcagatcaatttgacgagtcgaaaccgaaagaaagaaattccaaggcagctttcttttgctatttctattttgcactcaactttggatctttattctcaaacacccttttggtgtactttgaggatcatggcagatggacactaggcttcctgctatcattaggttctgcagtcgtagccttggtatcattcttgtttggggcacctggttacaagtacgtaaaaccttgcggcaaccctttgccgcgagttgctcaggtgtttgtggctgcagctaggaaatgggatgttatcccggtgaaagctgatgaactgtatgaactagaaggaccagaatctgctatcaaagggagcaggaagatttttcacagtgaagaatttgagtttttggacaaggcagcaacaatgacagaggatgatttgagtcaccaaaagaatccatggaggctttgcacaataactcaagtagaggaagccaaatgtgttcttaaaatgttacctatttggttatgcactattatttactctgttgtcttcactcagatggcatccctctttgttgagcaaggagatgtcatgaattcctatattggaaagtttcacctcccagctgctagcatgtctgccttcgatatctgcagtgtccttgtttgcactggaatttatcgtcaaatcctcgtgccattagctggaaggttaagtggtaatcctaaggggttaactgagcttcagaggatgggaattggactcgtcattggaatgctagcaatgcttgcagcgggtgctactgagattgaaaggctcaagaatgttattgaagggcacaaagtcagctctttaagcatattttggcaaattccacaatatgttcttgttggtgcatctgaggttttcatgtatataggtcaattggagttctttaacgggcaagcaccagacgggattaagagttttggaagctcactttgcatggcttcaatctctcttggcaactatgccagtagcatgctagttaatatggtgatgaagattacaactaaaggtgacaagcctggatggatcccagatgacttgaacacaggacacatggacaggttttacttcctgattgcagtgttaacagcctttgatttcgtgatttacttgttctgtgccaagtggtacaagcctatcaacattgatgacagtcagggaattgagatggaaaagcaagaagatgatgtgcttgcaaaagtttaa

SEQ ID NO: 478 - protein, 606 aa, Populus balsamifera
  REGION 123..521: note = Pfam Name: PTR2 Pfam Description: POT family
  REGION 1..606: note = Ceres Annot ID no. 8755079
  REGION 1..606: note = Bit score of 1186.9 for HMM based on sequences of Figure 11
  REGION 1..606: note = Functional Homolog Of SEQ ID NO. 426
  source 1..606: note = Populus balsamifera subsp. trichocarpa
MDSFSSTNAVLKKQVTGESSIISRENVAVKRIRTEEEQEIANRKPSLIWKRTGGWTAASILLANQCLATLAFFGVGVNLVLFLTRVLGQSNADAANNVSKWTGTVYLCSLVGAFLSDSYWGRYLTCAIFQLIFVSGLVLVSVSSWFFLIKPDGCGDGKLTCVPATSMGQVVFYLAIYLVAFGYGGHQPSIATFGADQFDESKPKERNSKAAFFCYFYFALNFGSLFSNTLLVYFEDHGRWTLGFLLSLGSAVVALVSFLFGAPGYKYVKPCGNPLPRVAQVFVAAARKWDVIPVKADELYELEGPESAIKGSRKIFHSEEFEFLDKAATMTEDDLSHQKNPWRLCTITQVEEAKCVLKMLPIWLCTIIYSVVFTQMASLFVEQGDVMNSYIGKFHLPAASMSAFDICSVLVCTGIYRQILVPLAGRLSGNPKGLTELQRMGIGLVIGMLAMLAAGATEIERLKNVIEGHKVSSLSIFWQIPQYVLVGASEVFMYIGQLEFFNGQAPDGIKSFGSSLCMASISLGNYASSMLVNMVMKITTKGDKPGWIPDDLNTGHMDRFYFLIAVLTAFDFVIYLFCAKWYKPINIDDSQGIEMEKQEDDVLAKV

SEQ ID NO: 479 - protein, 572 aa, Oryza sativa
  REGION 93..497: note = Pfam Name: PTR2 Pfam Description: POT family
  REGION 1..572: note = Public GI ID no. 115470147
  REGION 1..572: note = Bit score of 1062.2 for HMM based on sequences of Figure 11
  REGION 1..572: note = Functional Homolog Of SEQ ID NO. 426
  source 1..572: note = Oryza sativa subsp. japonica
MEATTTDGTTDHAGKPAVRSKSGTWRACPFILGNECCERLAYYGMSANLVNYMVDRLRQGNAGAAASVNNWSGTCYVMPLVGAFLADAYLGRYRTIAAFMALYIVGLALLTMSASVPGMKPPNCATISASSCGPSPGQSAAFFVALYLIALGTGGIKPCVSSFGADQFDDADPREHRSKASFFNWFYMSINVGALVASSVLVWVQMNVGWGWGFGIPAVAMAVAVASFLMGSSLYRHQKPGGSPLTRMLQVVVAAARKSRVALPADAAALLYEGDKLACGTRRLAHTEQFRWLDRAAVVTPTTDKDDDTGSRWRLCPVTQVEELKAVVRLLPVWASGIVMSAVYGQMSTMFVLQGNTLDPRMGATFKIPSASLSIFDTLAVLAWVPVYDRLIVPAARRFTGHPRGFTQLQRMGIGLLISVFSMVAAGVLEVVRLRVAAAHGMLDSTSYLPISIFWQVQYFIIGAAEVFAFIGQIDFFYDQAPDDMRSTCTALSLTSSALGNYLSTLLVVIVTAASTRGGGLGWIPDNLNRGHLDYFFWLLAALSAVNFLVYLWIANWYRCKTITTTEAAAQT

SEQ ID NO: 480 - protein, 570 aa, Arabidopsis thaliana
  REGION 97..499: note = Pfam Name: PTR2 Pfam Description: POT family
  REGION 1..570: note = Public GI ID no. 15240905
  REGION 1..570: note = Bit score of 1099.4 for HMM based on sequences of Figure 11
  REGION 1..570: note = Functional Homolog Of SEQ ID NO. 426
MEDDKDIYTKDGTLDIHKKPANKNKTGTWKACRFILGTECCERLAYYGMSTNLINYLEKQMNMENVSASKSVSNWSGTCYATPLIGAFIADAYLGRYWTIASFVVIYIAGMTLLTISASVPGLTPTCSGETCHATAGQTAITFIALYLIALGTGGIKPCVSSFGADQFDDTDEKEKESKSSFFNWFYFVINVGAMIASSVLVWIQMNVGWGWGLGVPTVAMAIAVVFFFAGSNFYRLQKPGGSPLTRMLQVIVASCRKSKVKIPEDESLLYENQDAESSIIGSRKLEHTKILTFFDKAAVETESDNKGAAKSSSWKLCTVTQVEELKALIRLLPIWATGIVFASVYSQMGTVFVLQGNTLDQHMGPNFKIPSASLSLFDTLSVLFWAPVYDKLIVPFARKYTGHERGFTQLQRIGIGLVISIFSMVSAGILEVARLNYVQTHNLYNEETIPMTIFWQVPQYFLVGCAEVFTFIGQLEFFYDQAPDAMRSLCSALSLTAIAFGNYLSTFLVTLVTKVTRSGGRPGWIAKNLNNGHLDYFFWLLAGLSFLNFLVYLWIAKWYTYKKTTGHAL

SEQ ID NO: 481 - DNA, 1809 bp, Populus balsamifera
  misc_feature 1..1809: note = Ceres Annot ID no. 8755085
  misc_feature 1..1809: note = Encodes the peptide sequence at SEQ ID NO. 482
  source 1..1809: mol_type = unassigned DNA; note = Populus balsamifera subsp. trichocarpa
atggattcagacccttccaccgattatcaggtgacaggagaaagtgtcatctctagagaaaatgtagctgtgaacagaatcagaactgaggaagaacacgatattgctagcaataagcgctccattacttggaagagctctggagggtggaaagctgcaagcatcttgctagcaaatcaatgcctggctacactagctttctttggagttggtgtgaatttggttctgttcttaacaagagttcttggtcaaagtaatgctgatgctgccaatagtgtcagcaagtggactggcacagtttatctgtgctcactcataggagctttcctcagtgattcatactggggcagatacttgacctgtgcagtctttcagttaatattcgtttcggggttggcgctcgtatcggtatcatcttgttatttcttgatcaaaccagatggatgtggtgatggagaattagcctgtgagccaacatcgtcggtgggagtggctattttttacttggctatatatttagttgcctttggatatggtgggcatcaaccttctttagccacatttggagcagaccaatttgacgagtcgaaaccgaaagaaaaaaattacaaggcagcttacttttgctatttctattttgcactcaactttggatctctattctcaaacactattttggtgtattttgaggatcatggaaaatggacactaggtttcctggtgtcattaggctctgcagttttagccttggtatcgttcttgtttgggacacctggttaccagtatgtgaaaccttgcggcaaccctttgccgcgagttgctcaggtgtttgtggctgcagttaagaaatgggatgttatcccggcgaaagctgatgaactttatgaagtggaaggaccagaatctgctatcaaagggagcagaaagattcttcatagtgatgattttgagtttttggacaaggcagcaacagtaacagaggatgatctaagtcaccaaaagaatccatggaggctttgcacaataagtcaagtagaggaagctaaatgtgttcttaaaatgttacctatttggctatgcactataatttactctgttgttttcacacaaatggcctccctctttgttgagcaaggagatgtcatgaactcctatgctggaaagtttcacctaccagcagctagcatgtctgcctttgatatctgcagtgtccttgtttgcactgggatttatcgccaaatcctcgtgccattagctggaaggttaagtggtaataccaaggggttaacggagcttcagagaatgggaatcggactcatcattgggatgctagcaatgttcgcagcaggggctactgagattgaaaggctcaagcatgttactgaagggaaaaaagttagctcactaagcatattttggcaaattccacaatacgttcttgtcggtgcatctgaggttttcatgtatgtaggccagttggagttctttaacgggcaagcaccagacgggattaagagttttggaagctcactttgcatggcttcaatctcccttggcaactatgtcagcagcatgctagtcagcatggtgatgaagattacagctaaaggtgacaagcctggatggatcccagatgacttgaacacaggccacatggacaggttctacttcctgattgcagtcttaacagcctttgattttgtgatttacttgttctgtgccaactggtacacgcctatcaacattgatgacagccacggaggaattgggatggaaaagcaagaagatgatgcgcttgcaagagtttaa

SEQ ID NO: 482 - protein, 602 aa, Populus balsamifera
  REGION 118..516: note = Pfam Name: PTR2 Pfam Description: POT family
  REGION 1..602: note = Ceres Annot ID no. 8755085
  REGION 1..602: note = Bit score of 1181.0 for HMM based on sequences of Figure 11
  REGION 1..602: note = Functional Homolog Of SEQ ID NO. 426
  source 1..602: note = Populus balsamifera subsp. trichocarpa
MDSDPSTDYQVTGESVISRENVAVNRIRTEEEHDIASNKRSITWKSSGGWKAASILLANQCLATLAFFGVGVNLVLFLTRVLGQSNADAANSVSKWTGTVYLCSLIGAFLSDSYWGRYLTCAVFQLIFVSGLALVSVSSCYFLIKPDGCGDGELACEPTSSVGVAIFYLAIYLVAFGYGGHQPSLATFGADQFDESKPKEKNYKAAYFCYFYFALNFGSLFSNTILVYFEDHGKWTLGFLVSLGSAVLALVSFLFGTPGYQYVKPCGNPLPRVAQVFVAAVKKWDVIPAKADELYEVEGPESAIKGSRKILHSDDFEFLDKAATVTEDDLSHQKNPWRLCTISQVEEAKCVLKMLPIWLCTIIYSVVFTQMASLFVEQGDVMNSYAGKFHLPAASMSAFDICSVLVCTGIYRQILVPLAGRLSGNTKGLTELQRMGIGLIIGMLAMFAAGATEIERLKHVTEGKKVSSLSIFWQIPQYVLVGASEVFMYVGQLEFFNGQAPDGIKSFGSSLCMASISLGNYVSSMLVSMVMKITAKGDKPGWIPDDLNTGHMDRFYFLIAVLTAFDFVIYLFCANWYTPINIDDSHGGIGMEKQEDDALARV

SEQ ID NO: 483 - protein, 551 aa, Vitis vinifera
  REGION 115..519: note = Pfam Name: PTR2 Pfam Description: POT family
  REGION 1..551: note = Public GI ID no. 147853446
  REGION 1..551: note = Bit score of 1137.1 for HMM based on sequences of Figure 11
  REGION 1..551: note = Functional Homolog Of SEQ ID NO. 426
MGSQEEEEVRSLLETGLLQNENSDLHTGDGSVDIHGKPVLRSNTGNWRACPFILGTECCERLAYYGIATNLVTYLTSKLHEGNVSAARNVTTWQGTCYLTPLIGAVLADAYCGRYWTIAAFSTIYFIGMCTLTLSATVPAFKPADCVGSVCPPATTAQYAVFFFGLYLIALGTGGIKPCVSSFGADQFDDTDPKERVKKGSFFNWFYFSINIGALVSSSFLVWIQDNAGWGLGFGIPALFMGIAIASFFSGTPLYRFQKPGGSPITRMCQVLVASFRKWKLEVPKDSNLLYETPDKNSAIEGSRKLEHSNELKCLDKAAVISDAEIKSGDFSNPWNLCTVTQVEELKILIRMFPIWATGIVFSAVYAQMSTMFVEQGMVMDTTVGSFTIPPASLSTFDVISVIFWVPVYDRILVPIARKFTGKERGFSELQRMGIGLFLSVLCMSAAALVEIKRLQLATALDLVDEDVAVPLSILWQIPQYFLLGAAEVFTFIGQLEFFYDQSPDAMRSLCSASSLLTTSLGNYLSAFILTVVTTLTTEBGKTGWIPDNLE

SEQ ID NO: 484 - protein, 547 aa, Vitis vinifera
  REGION 96..497: note = Pfam Name: PTR2 Pfam Description: POT family
  REGION 1..547: note = Public GI ID no. 157346087
  REGION 1..547: note = Bit score of 1069.5 for HMM based on sequences of Figure 11
  REGION 1..547: note = Functional Homolog Of SEQ ID NO. 426
MAEDDMYTKDGTMNIHNKPANKKKTGQWKACRFILGNECCERLAYYGMSTNLVNYLQIRLNQGNVTASNNVTNWSGTCYITPLIGAFLADAYFGRFWIIAIFSIIYFCGMVLLTMTASIKGLRPSCDDNGCDPTKLQSAVCFIALYLIALGTGGIKPCVSSFGADQFDVNDEAEKKKKSSFFNWFYLSINVGALIASSVLVWIQMNVGWGWGFGIPAVAMAIAVVSFFSGSRMYRLQKPGGSPLTRICQVLVASTRKYHVKVPNNKSLLYETKDAESNIKGSCKLEHTEKLRFFDKAAVEVESDHVKSSNNPWKLCTVTQVEELKSILRLLPVWATGILFSTVYSQMSTMFVLQGNTMDQHMGPNFKIPSASLSLFDTLSVIFWAPVYDRIIVPFARKFTGHERGFTQLQRMGIGLVISIISMIVAGILEVIRLNYVRKHNYYDLEYIPMSIFWQVPQYFLIGCAEVFTFIGQLEFYYDQAPDATRITIVNKVTTRNGKMGWIPDNMNRGHLDYFYWLLAILSLLNFLVYLWIAKWYTYKKVTGRPG

SEQ ID NO: 485 - DNA, 1797 bp, Populus balsamifera
  misc_feature 1..1797: note = Ceres Annot ID no. 1538867
  misc_feature 1..1797: note = Encodes the peptide sequence at SEQ ID NO. 486
  source 1..1797: mol_type = unassigned DNA; note = Populus balsamifera subsp. trichocarpa
atggcttgtttggaggtttgtaaggagggtaagttcaaagagggacgagaagaatgcacttttgatggaacagttgattggcatggtcgtcctgctatcaaagacaaatctgggcaatgggttgctggaattattatacttttgaaccaaggtctagcaacacttgcattctttggtgttggtgtgaacttagttctgttcctgacaagggttttgcaacaaagcaatgccgatgctgctaataacgttagcaaatggaccgggaccgtctacatcttctctcttgttggtgctttcctcagcgattcctactggggaagatacaaaacctgtgcaatttttcaggtcatctttgtcataggcctagtaatcctatcactctcgtcataccttttcttaatcagaccaaaaggatgtgggaatgagctgactccatgtggatcccattcaagcatggaagtttcattgttttacctctccatttacctcgttgctctaggaaatggagggtatcaacctaacattgctacatttggggctgatcagtttgatgaagaggaccccagggaaggacattccaaggttgcattttttagctacttctacctggccttgaacctcggttccctcttttccaacacaatattggggtattttgaggatgaaggggtgtgggcactaggattctgggcgtctgcaggttctgcctttgcagcattggtcttgtttctaggaggaacatctagataccggcacttcaaaccaagtggtaaccctctctccaggttctgccaagtcatcatcgctgcaatgaagaaatggaagctcgagatgccacgagatggagaggaggagctgtataatgtccatgcaaaagattgctcgatgaatggcaacagaaagattctccacactgatggattcaagttcttggatagagcagctttcatctcttcaagagatattgatgatcaaaagcggggctgtcgcaacccatggcgtctgtgcccaattacacaagtagaagaagttaaatgcatactgagactactcccaatttggctctgcaccataatctattcagtggttttcacacagatggcctctctgtttgttgagcagggtgctgcaatgaaaactacagtatcaaacttcaaaatccctcctgccagcatgtctagcttcgatattctaagtgttgcgtttttcattttcctatatcggcgagttcttgatccacttgtaagcagagttaaaaagacgggttcaaaaggactaactgaacttcaaagaatgggtgttggccttgtgatagcaatagtggcaatgatttcggctgggcttgtggagtgttatagactcaggtatgcaagaaaagactgcacacactgtgaaggctcaagctctatgagcatcttctggcaagttcctcagtatgcacttattggagcttctgaagttttcatgtatgttggtcaactggagttctttaatgcacaaactcctgatggattaaagagcttcggaagtgcactttgtatgacatctatctcgctagggaattacgtgagtagcttgcttgtgactatggttatgaagatctcgactgaggatcacatgcccggatggatccccggaaatctgaacaaaggtcacctggataggttttacttcctcttagcaaccttgacaactatagacctagttgtgtatatagcatgtgctaggtggtacaagtctatccaactggaaggaaaatgcgagctgaatgatcaggaagagaacttcagagtctga

SEQ ID NO: 486 - protein, 598 aa, Populus balsamifera
  REGION 108..517: note = Pfam Name: PTR2 Pfam Description: POT family
  REGION 1..598: note = Ceres Annot ID no. 1538867
  REGION 1..598: note = Bit score of 1302.6 for HMM based on sequences of Figure 11
  REGION 1..598: note = Functional Homolog Of SEQ ID NO. 426
  source 1..598: note = Populus balsamifera subsp. trichocarpa
MACLEVCKEGKFKEGREECTFDGTVDWHGRPAIKDKSGQWVAGIIILLNQGLATLAFFGVGVNLVLFLTRVLQQSNADAANNVSKWTGTVYIFSLVGAFLSDSYWGRYKTCAIFQVIFVIGLVILSLSSYLFLIRPKGCGNELTPCGSHSSMEVSLFYLSIYLVALGNGGYQPNIATFGADQFDEEDPREGHSKVAFFSYFYLALNLGSLFSNTILGYFEDEGVWALGFWASAGSAFAALVLFLGGTSRYRHFKPSGNPLSRFCQVIIAAMKKWKLEMPRDGEEELYNVHAKDCSMNGNRKILHTDGFKFLDRAAFISSRDIDDQKRGCRNPWRLCPITQVEEVKCILRLLPIWLCTIIYSVVFTQMASLFVEQGAAMKTTVSNFKIPPASMSSFDILSVAFFIFLYRRVLDPLVSRVKKTGSKGLTELQRMGVGLVIAIVAMISAGLVECYRLRYARKDCTHCEGSSSMSIFWQVPQYALIGASEVFMYVGQLEFFNAQTPDGLKSFGSALCMTSISLGNYVSSLLVTMVMKISTEDHMPGWIPGNLNKGHLDRFYFLLATLTTIDLVVYIACARWYKSIQLEGKCELNDQEENFRV

SEQ ID NO: 487 - DNA, 1779 bp, Medicago truncatula
  misc_feature 1..1779: note = Ceres Annot ID no. 8755091
  misc_feature 1..1779: note = Encodes the peptide sequence at SEQ ID NO. 488
  source 1..1779: mol_type = unassigned DNA
atggcttgcttagaggtctgcaaagaggggaagttcaaagaagaaacagaagagttaactcttgatgggagtgttgattggcatggtcgcccatcaatcagagccacatccgggagatggtttgccggaactattatactcttgaaccaaggtctagcaaccttagcattctttggagttggagtgaacctagttctgttcttgacaagggtgttgggtcaagataatgctgctgctgctaacaatgtcagcaagtggactggcacagtttacatcttctctcttgttggtgctttccttagtgattcttattggggaagatacaaaacatgtgctatctttcaaggcatttttgtaaccggtctagtatctttgtccgttacaacataccttgctttgcttagaccaaaaggttgtggaaatggaaaacttgaatgtggggaacattcaagtttggaaatgggaatgttctacctatcaatctatctgattgccttaggaaatggagggtatcaaccaaacattgcaacatttggtgctgaccaatttgatgaagatcactcaaaggagagttattcaaaagtggcattttttagctacttttacttggcattgaaccttggttcacttttctcaaacactattttgggctattttgaagatgaaggattatgggctcttgggttttgggcttctgctgggtctgcctttttggctcttgtactttttcttgttggcaccccaaaatatagacactttaaaccttgtggcaatcctctttctagattctgccaagtgtttttcgctgcttcaaggaaattgggagttcaaatgacttcaaatggagatgacttgtatgtcatagatgaaaaggagtcttctaacaactccaacagaaagattctccacacacatggcttcaagtttttggatagggcagcttatataacttcaagagatttagaggtccaaaaaggaggccaacataacccatggtatctgtgtcctattactcaagttgaagaagtaaaatgcatactaagacttcttccaatttggctttgcacaataatctactcagtagttttcactcagatggcttccctttttgtggagcaaggtgctgcaatgaaaaccacaatttccagtttcaaaataccaccagcaagcatgtctagcttcgatatcctcagcgtagccatcttcattttcttctaccgtcgagtacttgatccactcgtcggaaaactcaaaaaatcaagttccaagggactcactgaacttcaaagaatgggaatcggtctcgttatagctataatcgcaatggttacagctggaatagttgaatgttacaggcttaagtatgcaaaacaaggtgacacaagctctctaagtatcttctggcaaattcctcagtatgcacttataggagcttctgaggtttttatgtatgtaggacaattagaatttttcaatgctcaaacacctgatggattaaagagctttggaagtgcactttgcatgacaagtatctcacttgggaactatgtgagtagcttaattgttagtattgttatgaagatttcaactgaagatcacatgccaggatggatccctggaaacttgaatagaggtcacttggataggtttttcttcctattggctgttttgacttctttagatttgattgcttatattgcatgtgcaaagtggtttcagaatattcagatggcatgcaaatatgataacaatgacgagcctagtagctgcaaagtttaa

SEQ ID NO: 488 - protein, 592 aa, Medicago truncatula
  REGION 108..511: note = Pfam Name: PTR2 Pfam Description: POT family
  REGION 1..592: note = Ceres Annot ID no. 8755091
  REGION 1..592: note = Bit score of 1252.7 for HMM based on sequences of Figure 11
  REGION 1..592: note = Functional Homolog Of SEQ ID NO. 426
MACLEVCKEGKFKEETEELTLDGSVDWHGRPSIRATSGRWFAGTIILLNQGLATLAFFGVGVNLVLFLTRVLGQDNAAAANNVSKWTGTVYIFSLVGAFLSDSYWGRYKTCAIFQGIFVTGLVSLSVTTYLALLRPKGCGNGKLECGEHSSLEMGMFYLSIYLIALGNGGYQPNIATFGADQFDEDHSKESYSKVAFFSYFYLALNLGSLFSNTILGYFEDEGLWALGFWASAGSAFLALVLFLVGTPKYRHFKPCGNPLSRFCQVFFAASRKLGVQMTSNGDDLYVIDEKESSNNSNRKILHTHGFKFLDRAAYITSRDLEVQKGGQHNPWYLCPITQVEEVKCILRLLPIWLCTIIYSVVFTQMASLFVEQGAAMKTTISSFKIPPASMSSFDILSVAIFIFFYRRVLDPLVGKLKKSSSKGLTELQRMGIGLVIAIIAMVTAGIVECYRLKYAKQGDTSSLSIFWQIPQYALIGASEVFMYVGQLEFFNAQTPDGLKSFGSALCMTSISLGNYVSSLIVSIVMKISTEDHMPGWIPGNLNRGHLDRFFFLLAVLTSLDLIAYIACAKWFQNIQMACKYDNNDEPSSCKV

SEQ ID NO: 489 - DNA, 1713 bp, Populus balsamifera
  misc_feature 1..1713: note = Ceres Annot ID no. 1492702
  misc_feature 1..1713: note = Encodes the peptide sequence at SEQ ID NO. 490
  source 1..1713: mol_type = unassigned DNA; note = Populus balsamifera subsp. trichocarpa
atggcagaggaggatgtttatacaaaagatggaacagtggattatcgtgggaatccagctaacaaaaaggagacgggaacctggagagcctgcccttatattataggaaatgaattttgtgaacgattggcttactatgggatgagctccaatctgattctttatttcaagcacagactgaatcaacaaagcgctacagctactagaaataacttgaattggggtggaacgtgctatctcactccattgattggagcattctttgctgatgcttatcttggtagatattggacgattgcttgtttctccatcatatatgttatggggatgacacttttgacaatctcagctactgtccctggcctaaggccaaaatgttatgcagaagatgattgtaatccaacagatgctcaaagtgcattagcttttgtatcactttacctaatagcactaggcactggtggtattaagccttgtgtctcatcctatggagcagatcagtttgatgacgctgatgaggttgagaaaaaacacaagagttctttcttcaactggttctacctctcaattaatgttggtgctcttattgccggttctgtgctggtttgggtacaagataatgtgagttggggttggggttttggcattccagcaatagccatggcaattgcggttgcgagcttcttttcaggtactcggttgttcaggtatcaaaagcctggaggcagccctcttactcgcatctgtcaggtgctgttggcatccttcagaaaaaagaaagttgaagttccagctgacaaggctttgttgtatgagactgcggatgccgaatccaacatcaaaggaagccgcaagcttgaccatactgaagaatttagtttccttgacaaggcagcagtggaaacagaaaaggacgacataaaggggccagtagacccatggagactttgcactgtaacccaagttgaggagctaaagtctatcattcggttgcttcccatatgggccacaggtatcatctttactgcagtgtacagccagatggggaacctatttgtgctgcaaggtgaacagatggataaatatgttggaaactccaatttccagataccatctgcatctctatcaatctttgacactcttagtgtcattttttgggtcccggtctatgaccgaattattgtcccagttgcaagaaaatacaccggacacaaaaatggcttaactcaactgcagcggatgggcattggtctcttcatatcaatattttccatggtatctgcagcaatcttggaacttaaaagacttgaaatggtgagaaggcacaactcctacgaacttaaaaccgtgcccttgtctatattttggcaagctccacagtatttcctgatagggtgtgcagaagttttcacattcatcggacagttggaattcttctacgagcaagcacctgatgcaatgaggagcatgtgttctgccctatcactcaccaccgtcgcacttggtagttacttaagctctcttcttgtaaccattgttacaagcatcagcactaagaatggaaagcctggatggataccggagaacttaaattatggtcacattgattacttcttctggctactgggagtactcagtgtgctgaatctatgtgtctttctcttgatctcaaattggtacacgtataaaaagccagtgggaactcttcgttga

SEQ ID NO: 490 - protein, 570 aa, Populus balsamifera
  REGION 96..499: note = Pfam Name: PTR2 Pfam Description: POT family
  REGION 1..570: note = Ceres Annot ID no. 1492702
  REGION 1..570: note = Bit score of 1122.2 for HMM based on sequences of Figure 11
  REGION 1..570: note = Functional Homolog Of SEQ ID NO. 426
  source 1..570: note = Populus balsamifera subsp. trichocarpa
MAEEDVYTKDGTVDYRGNPANKKETGTWRACPYIIGNEFCERLAYYGMSSNLILYFKHRLNQQSATATRNNLNWGGTCYLTPLIGAFFADAYLGRYWTIACFSIIYVMGMTLLTISATVPGLRPKCYAEDDCNPTDAQSALAFVSLYLIALGTGGIKPCVSSYGADQFDDADEVEKKHKSSFFNWFYLSINVGALIAGSVLVWVQDNVSWGWGFGIPAIAMAIAVASFFSGTRLFRYQKPGGSPLTRICQVLLASFRKKKVEVPADKALLYETADAESNIKGSRKLDHTEEFSFLDKAAVETEKDDIKGPVDPWRLCTVTQVEELKSIIRLLPIWATGIIFTAVYSQMGNLFVLQGEQMDKYVGNSNFQIPSASLSIFDTLSVIFWVPVYDRIIVPVARKYTGHKNGLTQLQRMGIGLFISIFSMVSAAILELKRLEMVRRHNSYELKTVPLSIFWQAPQYFLIGCAEVFTFIGQLEFFYEQAPDAMRSMCSALSLTTVALGSYLSSLLVTIVTSISTKNGKPGWIPENLNYGHIDYFFWLLGVLSVLNLCVFLLISNWYTYKKPVGTLR

SEQ ID NO: 491 - DNA, 1887 bp, Zea mays
  misc_feature 1..1887: note = Ceres Clone ID no. 325604
  misc_feature 1..1887: note = Encodes the peptide sequence at SEQ ID NO. 492
  source 1..1887: mol_type = unassigned DNA
ggggttgggggaggccctctgtctccatggatgaggcagcagggctgctgttgcaagaagagggtggaggtggggaccaagaagctctcctccttccacttccacaggatgttggcctttacacaggtgatggatctgttgatgtcaaagggcgccctgcgttaaagggcactacaggcaattggaaagcatgctttttcatcctagggaatgaatgttgtgaaaggctggcctactacggaattgcaaaaaacctagttacttatttgaaagtgaagcttcatctaggcaacctcgaggctgcaagacatgttaccacttggcaagggacatgctatctcactccccttgttggaggcatcttagcagactctcgttgggggaaatactggactattgctgttttctcatcggtttactttattggcctggctattttaacgctttctgcatcagtcccagcgttgcaaccaccttcatgtttaaggacagtttgtccagaagcaagcttacttcagtatggcatattttttggtggcctctatatgattgccctagggactggaggtatcaaaccttgtgtctcctcctttggagctgatcaatttgatgacactgaccaagcagagagagctaagaagggttcattcttcaattggttctacttctgtataaatatagtttcattcatatcaggcactatgatagtgtggatacaagataacactggttggggaataggctttgcgattcctactatattcatggcattagctatttcattcttcttctcagcttcaaataagtacagattccaaaaacctggtgggagtccactcacaagagtgtgccaggtggttatagcagcatttcgtaagtggcacattgaagtgccacatgatacatctctcctatatgaagttgatggccaaacttcagcaattgaaggaagccggaagctggagcacacaaatgagctcgagttccttgatagagctgctgttatctcatctgctgatctgaagagtgaatcctttaccgacccatggaagctttgcacagttacccaggtggaagaattgaagatcctaataagaatgtttcccatttgggctactactatcatattcagtgctgtttatgcccaaaactcttccatgttcatagagcagggcatggttcttgacaagcgcattgggtctttcaacattcctcctgcatctctctccacttttgatgtaatcagcgtcatcatgtgggtcccactctatgaccgcatcctggtgccactagctagaaaattcactggaagggagaagggtttttctgagctacagcggatgggaattggattagtcctgtccattctcgcgatgttatctgcagctctagttgagttgaagcgtttagagattgccaggtctgaaggtctcattcatgagaaggctgctgttccaatgagcattctttggcaaataccacaatatttcttggtgggcgctgctgaggtgtttacttgtattggtcaagttgagttcttttacgatcaggccccagatgccatgaggagtttatgtagtgcacttgcacttattacagtctcactgggaaactatataagctccatcatactgacattggtgtcgtacattacaactcagggaggagatcctggatggatccctgacaatctgaatgaaggccatctcgaccggttcttttggttaattgcagggataagctttgtaaatttgatagtttatatgggttgtgctgtcagatacagatataagaaagcctcttgattatatttatgtgaactcttgtaatgtgatttcccattcccgatatcatacttatcaaatacaatgcactgtacagatttct

SEQ ID NO: 492 - protein, 592 aa, Zea mays
  REGION 121..525: note = Pfam Name: PTR2 Pfam Description: POT family
  REGION 1..592: note = Ceres Clone ID no. 325604
  REGION 1..592: note = Bit score of 1162.3 for HMM based on sequences of Figure 11
  REGION 1..592: note = Functional Homolog Of SEQ ID NO. 426
MDEAAGLLLQEEGGGGDQEALLLPLPQDVGLYTGDGSVDVKGRPALKGTTGNWKACFFILGNECCERLAYYGIAKNLVTYLKVKLHLGNLEAARHVTTWQGTCYLTPLVGGILADSRWGKYWTIAVFSSVYFIGLAILTLSASVPALQPPSCLRTVCPEASLLQYGIFFGGLYMIALGTGGIKPCVSSFGADQFDDTDQAERAKKGSFFNWFYFCINIVSFISGTMIVWIQDNTGWGIGFAIPTIFMALAISFFFSASNKYRFQKPGGSPLTRVCQVVIAAFRKWHIEVPHDTSLLYEVDGQTSAIEGSRKLEHTNELEFLDRAAVISSADLKSESFTDPWKLCTVTQVEELKILIRMFPIWATTIIFSAVYAQNSSMFIEQGMVLDKRIGSFNIPPASLSTFDVISVIMWVPLYDRILVPLARKFTGREKGFSELQRMGIGLVLSILAMLSAALVELKRLEIARSEGLIHEKAAVPMSILWQIPQYFLVGAAEVFTCIGQVEFFYDQAPDAMRSLCSALALITVSLGNYISSIILTLVSYITTQGGDPGWIPDNLNEGHLDRFFWLIAGISFVNLIVYMGCAVRYRYKKAS

SEQ ID NO: 493 - protein, 621 aa, Oryza sativa
  REGION 150..552: note = Pfam Name: PTR2 Pfam Description: POT family
  REGION 1..621: note = Public GI ID no. 108707040
  REGION 1..621: note = Bit score of 1063.1 for HMM based on sequences of Figure 11
  REGION 1..621: note = Functional Homolog Of SEQ ID NO. 426
  source 1..621: note = Oryza sativa subsp. japonica
MEGVLLQQELPKKQFKAEHLSSWRVQQPFRAAKGAFMGSSLEAEQQSLIVRTTEPEDVDDYTGDGSVGFSGQPILKHETGNWRACSLILGTEVCERLAYYGISKSLVTYLSTRLHEGNVSAARNFTTWQGTCYLTPLIGATLADSYWGKYKTIAVFSTIYFLGMAALTFSALVPSLQPPQCFGSFCPQPTVPQYLIYFVGLYMIALGSGGIKPCVSSFGADQFDDTDPVERTKKGAFFNWFYFAINIGSLISGTVLIWVQQNCGYGIGFGIPTIFIALAIGSFFIGSQRYRYQIPGGSPLIRVCQVVIAAIHKRNVDLPVDSSVLYELHGKTSAIEGSRKLEHSSEFSFLDKAAVILSNERGGSHDPWRLCTITQVEELKILMRMFPIWATGIVFFTVCAQNSSMFIEQGMALNNQIESFKIPPATLSSLDVISIVVWVPIYETFVVPIASRLTGKERGFSELQRMGIGLFVATTAVATAALVEIKRLEIARSEDLIHSKVPVPMSILWQAPQYLLVGIGEVFTAIGQAEFFYNQSPDSMRSLCSAFALVTVSLGSYLSSFILTLVSYFTTRDDNPGWIPDNLNEGHLDRFFWLIAGLSFLNLLLFVYYAQQYKCKKAAAI

SEQ ID NO: 494 - DNA, 1845 bp, Arabidopsis thaliana
  misc_feature 1..1845: note = Ceres Annot ID no. 1302517
  misc_feature 1..1845: note = Encodes the peptide sequence at SEQ ID NO. 495
  source 1..1845: mol_type = unassigned DNA
atgtcttgcctagagatttataacaaagacacgatgaagaagaaagaaggagaagaagaaacaagagatgggacagtggattactatggtcgtccctctattcgttctaactcaggccaatgggttgctggcatcgtcattcttctgaaccaggggctggctacactagccttctttggagttggagtgaacttggtgctcttcctaactcgcgttttgcagcagaacaacgcagacgcagctaacaacgttagcaaatggacagggactgtttatatcttctcattggttggagcgtttctcagcgattcgtattggggtcgttacaagacttgtgctatcttccaagtcatttttgtcattggactttcatcgctatcgctatcatcatacatgttcttgattagaccaagaggttgtggggacgaagtcacgccttgtggttcacattccatgatggagatcacaatgttctacttctcgatctacttgatcgcattgggatatggcggttaccaaccaaacattgcaacgcttggagcggatcagttcgatgaggagcatcctaaagaagggtactcgaagattgcgtttttcagctacttttaccttgctttaaacctcggatcgctcttttcgaacaccatcttggggtattttgaggatgagggaatgtgggcactcgggttttgggcatccactggctctgctatcattgggttgattcttttccttgttggaacaccgagataccgatatttcaagcccacggggaatcctctttcgaggttttgccaagttttggtcgctgcaacgaagaaatcatcggtggaggcaccattaagagggagagaggagatgtatgacggagacagcgaagggaaaaatgcttcagttaacacagggagaaggatagtgcataccgatgaattcaagttcttggacaaagcagcgtacatcacagctagagatctagatgacaagaaacaagactcagtgaacccatggaggctctgtccagtgacacaagtcgaggaagtcaagtgtattcttagactgatgccaatttggctctgcactataatctactcagtcgtcttcactcaaatggcctctctctttgtggagcaaggcgctgcaatgaatacctctgtctcagatttcaaaatccccccggcaagtatgtccagcttcgacatccttagcgtcgctttgttcatattcctgtaccgcagagttctcgagccagtagccaacagattcaaaaagaatggatcaaaaggaatcaccgagcttcacaggatgggaatcggacttgtgattgctgtcatagctatgattgcagccgggattgtggaatgctataggcttaagtatgcagacaagagttgtactcactgtgatggctcaagctccttaagcatcttctggcaggctccacaatactcactcatcggggcatcagaagtgttcatgtacgtgggtcagcttgagttcttcaacgcgcaaacaccagacggactaaagagcttcgggagcgctctgtgtatgatgtcaatgtcaatggggaactttgttagtagcttgttggtaacaatggtggtgaagatctcaacagaggatcacatgcctggttggattccaaggaatctcaacaaaggtcacttagacagattctatttcctcctggctgcgttgacgagcattgacctggtggtatacattgcatgtgcaaaatggtacaaacctatacaactagaaggaaaagatgagatgcaagacatgagtgatgatgactatgacaccgagagtgaagaggaacgagagaaggattctaaagtctaa

SEQ ID NO: 495 - protein, 614 aa, Arabidopsis thaliana
  REGION 109..520: note = Pfam Name: PTR2 Pfam Description: POT family
  REGION 1..614: note = Ceres Annot ID no. 1302517
  REGION 1..614: note = Bit score of 1239.2 for HMM based on sequences of Figure 11
  REGION 1..614: note = Functional Homolog Of SEQ ID NO. 426
MSCLEIYNKDTMKKKEGEEETRDGTVDYYGRPSIRSNSGQWVAGIVILLNQGLATLAFFGVGVNLVLFLTRVLQQNNADAANNVSKWTGTVYIFSLVGAFLSDSYWGRYKTCAIFQVIFVIGLSSLSLSSYMFLIRPRGCGDEVTPCGSHSMMEITMFYFSIYLIALGYGGYQPNIATLGADQFDEEHPKEGYSKIAFFSYFYLALNLGSLFSNTILGYFEDEGMWALGFWASTGSAIIGLILFLVGTPRYRYFKPTGNPLSRFCQVLVAATKKSSVEAPLRGREEMYDGDSEGKNASVNTGRRIVHTDEFKFLDKAAYITARDLDDKKQDSVNPWRLCPVTQVEEVKCILRLMPIWLCTIIYSVVFTQMASLFVEQGAAMNTSVSDFKIPPASMSSFDILSVALFIFLYRRVLEPVANRFKKNGSKGITELHRMGIGLVIAVIAMIAAGIVECYRLKYADKSCTHCDGSSSLSIFWQAPQYSLIGASEVFMYVGQLEFFNAQTPDGLKSFGSALCMMSMSMGNFVSSLLVTMVVKISTEDHMPGWIPRNLNKGHLDRFYFLLAALTSIDLVVYIACAKWYKPIQLEGKDEMQDMSDDDYDTESEEEREKDSKV

SEQ ID NO: 496 - DNA, 1830 bp, Arabidopsis thaliana
  misc_feature 1..1830: note = Ceres Annot ID no. 1355964
  misc_feature 1..1830: note = Encodes the peptide sequence at SEQ ID NO. 497
  source 1..1830: mol_type = unassigned DNA
atggccgctatggatccgagaaataatggcaacgttgctccgctaaatgagcgggagagagcagaaaatttggaagttcgtgaagtggtagaggttcaagatgatcaaagtgtggtgtctcttatgtccaacgattctgaccttcagaaaaagatgatgaagaaagaggagaagaagaatggtggctggacaaacgcaatcattttgctagtaaatcaagggttagctacattggccttctttggtgtgggagtaaacttggtgttgttcctaacacgtgttatgggacaaggtaatgcagaagctgcgaacaatgtaagcaagtggacaggaacagtttacatgttctctctcgttggggcatttcttagtgactcctattggggtcgttacttgacttgcacgatattccaagtcatcttcgttatcggtgttggcctcctctcttttgtctcttggtttttcttgattaaacctcgaggatgtggcgatggggaccttgaatgcaaccctccctcttccctcggagttgctatcttttatctatctgtatatttggtagcttttggatacggaggccaccagccaacgctggctactttcggtgcagaccagcttgatgatgataaaaactccaaagctgcgtttttcagctacttctactttgctctcaacgtgggagctctcttttcaaacacaatccttgtttattttgaggataaagggttgtggactgaaggtttcttggtgtcactaggctccgctattgtcgcattggtggcttttttggccccaacaagacaatatcgttatgtcaagccgtgtggtaacccgttgcctcgtgtggcgcaagtatttgtggccactgctcgtaagtggagtgttgttcgaccaggagatccgcatgagttgtacgaacttgaaggtcctgaatccgccattaaaggaagtcgaaagatatttcatagtaccaaatttctcttcttggatagagcagcagtgattacagagaatgataggaatgggacaaggagcaatgcatggaggttgtgcagtgtaactcaagtagaggaggcaaaatgtgtgatgaagttgcttccaatatggctatgcactataatctactcagtgatcttcacacaaatggcgtcattgtttgtggagcaaggtgatgtgatgaatgcatacgtagggaaattccacatccccgcagcgagcatgtcggtcttcgacatattcagcgtctttgtatcaacaggaatctaccgccacatcatatttccatacgtgagacccacggaacttatgcggatggggatagggctgatcatagggataatggcaatggtagctgcaggattaacagagatccaacggctgaaacgagtagtcccggggcaaaaggagagtgagctcaccattttatggcaaattccacagtacgtgcttgtgggagcaagtgaggtgttcatgtacgttggacagttagagttcttcaacggacaagcaccagacgggttaaagaacttaggaagctcgttgtgtatggcttcgatggctttaggtaactacgtgagcagtttgatggttaatattgttatggccataaccaaaagaggtgagaatagccccgggtggataccggaaaatctcaacgaaggtcatatggatcggttttattttctgattgccgcgttagcagctatcgattttgtggtttatttgatatttgcaaagtggtaccaacccataagtcatgatgaagatagtatcaagggcggttctggtggtagtctgaagaagaccgtttctgagttggaacaagtttga

SEQ ID NO: 497 - protein, 609 aa, Arabidopsis thaliana
  REGION 131..519: note = Pfam Name: PTR2 Pfam Description: POT family
  REGION 1..609: note = Ceres Annot ID no. 1355964
  REGION 1..609: note = Bit score of 1088.7 for HMM based on sequences of Figure 11
  REGION 1..609: note = Functional Homolog Of SEQ ID NO. 426
MAAMDPRNNGNVAPLNERERAENLEVREVVEVQDDQSVVSLMSNDSDLQKKMMKKEEKKNGGWTNAIILLVNQGLATLAFFGVGVNLVLFLTRVMGQGNAEAANNVSKWTGTVYMFSLVGAFLSDSYWGRYLTCTIFQVIFVIGVGLLSFVSWFFLIKPRGCGDGDLECNPPSSLGVAIFYLSVYLVAFGYGGHQPTLATFGADQLDDDKNSKAAFFSYFYFALNVGALFSNTILVYFEDKGLWTEGFLVSLGSAIVALVAFLAPTRQYRYVKPCGNPLPRVAQVFVATARKWSVVRPGDPHELYELEGPESAIKGSRKIFHSTKFLFLDRAAVITENDRNGTRSNAWRLCSVTQVEEAKCVMKLLPIWLCTIIYSVIFTQMASLFVEQGDVMNAYVGKFHIPAASMSVFDIFSVFVSTGIYRHIIFPYVRPTELMRMGIGLIIGIMAMVAAGLTEIQRLKRVVPGQKESELTILWQIPQYVLVGASEVFMYVGQLEFFNGQAPDGLKNLGSSLCMASMALGNYVSSLMVNIVMAITKRGENSPGWIPENLNEGHMDRFYFLIAALAAIDFVVYLIFAKWYQPISHDEDSIKGGSGGSLKKTVSELEQV

SEQ ID NO: 498 - DNA, 1758 bp, Arabidopsis thaliana
  misc_feature 1..1758: note = Ceres Annot ID no. 8755104
  misc_feature 1..1758: note = Encodes the peptide sequence at SEQ ID NO. 499
  source 1..1758: mol_type = unassigned DNA
atggccgctatggatccgagaaataatggcaaccgggagagagcagaaaatttggaagttcgtgaagtggtagaggttcaagatgatcaaagtgtggagaagaagaatggtggctggacaaacgcaatcattttgctagtaaatcaagggttagctacattggccttctttggtgtgggagtaaacttggtgttgttcctaacacgtgttatgggacaaggtaatgcagaagctgcgaacaatgtaagcaagtggacaggaacagtttacatgttctctctcgttggggcatttcttagtgactcctattggggtcgttacttgacttgcacgatattccaagtcatcttcgttatcggtgttggcctcctctcttttgtctcttggtttttcttgattaaacctcgaggatgtggcgatggggaccttgaatgcaaccctccctcttccctcggagttgctatcttttatctatctgtatatttggtagcttttggatacggaggccaccagccaacgctggctactttcggtgcagaccagcttgatgatgataaaaactccaaagctgcgtttttcagctacttctactttgctctcaacgtgggagctctcttttcaaacacaatccttgtttattttgaggataaagggttgtggactgaaggtttcttggtgtcactaggctccgctattgtcgcattggtggcttttttggccccaacaagacaatatcgttatgtcaagccgtgtggtaacccgttgcctcgtgtggcgcaagtatttgtggccactgctcgtaagtggagtgttgttcgaccaggagatccgcatgagttgtacgaacttgaaggtcctgaatccgccattaaaggaagtcgaaagatatttcatagtaccaaatttctcttcttggatagagcagcagtgattacagagaatgataggaatgggacaaggagcaatgcatggaggttgtgcagtgtaactcaagtagaggaggcaaaatgtgtgatgaagttgcttccaatatggctatgcactataatctactcagtgatcttcacacaaatggcgtcattgtttgtggagcaaggtgatgtgatgaatgcatacgtagggaaattccacatccccgcagcgagcatgtcggtcttcgacatattcagcgtctttgtatcaacaggaatctaccgccacatcatatttccatacgtgagacccacggaacttatgcggatggggatagggctgatcatagggataatggcaatggtagctgcaggattaacagagatccaacggctgaaacgagtagtcccggggcaaaaggagagtgagctcaccattttatggcaaattccacagtacgtgcttgtgggagcaagtgaggtgttcatgtacgttggacagttagagttcttcaacggacaagcaccagacgggttaaagaacttaggaagctcgttgtgtatggcttcgatggctttaggtaactacgtgagcagtttgatggttaatattgttatggccataaccaaaagaggtgagaatagccccgggtggataccggaaaatctcaacgaaggtcatatggatcggttttattttctgattgccgcgttagcagctatcgattttgtggtttatttgatatttgcaaagtggtaccaacccataagtcatgatgaagatagtatcaagggcggttctggtggtagtctgaagaagaccgtttctgagttggaacaagtttga

SEQ ID NO: 499 - protein, 585 aa, Arabidopsis thaliana
  REGION 107..495: note = Pfam Name: PTR2 Pfam Description: POT family
  REGION 1..585: note = Ceres Annot ID no. 8755104
  REGION 1..585: note = Bit score of 1097.7 for HMM based on sequences of Figure 11
  REGION 1..585: note = Functional Homolog Of SEQ ID NO. 426
MAAMDPRNNGNRERAENLEVREVVEVQDDQSVEKKNGGWTNAIILLVNQGLATLAFFGVGVNLVLFLTRVMGQGNAEAANNVSKWTGTVYMFSLVGAFLSDSYWGRYLTCTIFQVIFVIGVGLLSFVSWFFLIKPRGCGDGDLECNPPSSLGVAIFYLSVYLVAFGYGGHQPTLATFGADQLDDDKNSKAAFFSYFYFALNVGALFSNTILVYFEDKGLWTEGFLVSLGSAIVALVAFLAPTRQYRYVKPCGNPLPRVAQVFVATARKWSVVRPGDPHELYELEGPESAIKGSRKIFHSTKFLFLDRAAVITENDRNGTRSNAWRLCSVTQVEEAKCVMKLLPIWLCTIIYSVIFTQMASLFVEQGDVMNAYVGKFHIPAASMSVFDIFSVFVSTGIYRHIIFPYVRPTELMRMGIGLIIGIMAMVAAGLTEIQRLKRVVPGQKESELTILWQIPQYVLVGASEVFMYVGQLEFFNGQAPDGLKNLGSSLCMASMALGNYVSSLMVNIVMAITKRGENSPGWIPENLNEGHMDRFYFLIAALAAIDFVVYLIFAKWYQPISHDEDSIKGGSGGSLKKTVSELEQV

SEQ ID NO: 500 - protein, 568 aa, Vitis vinifera
  REGION 96..497: note = Pfam Name: PTR2 Pfam Description: POT family
  REGION 1..568: note = Public GI ID no. 147802380
  REGION 1..568: note = Bit score of 1155.1 for HMM based on sequences of Figure 11
  REGION 1..568: note = Functional Homolog Of SEQ ID NO. 426
MAEDDMYTKDGTMNIHNKPANKKKTGQWKACRFILGNECCERLAYYGMSTNLVNYLQIRLNQGNVTASNNVTNWSGTCYITPLIGAFLADAYFGRFWIIAIFSIIYFCGMVLLTMTASIKGLRPSCDDNGCDPTKLQSAVCFIALYLIALGTGGIKPCVSSFGADQFDVNDEAEKKKKSSFFNWFYLSINVGALIASSVLVWIQMNVGWGWGFGIPAVAMAIAVVSFFSGSRMYRLQKPGGSPLTRICQVLVASTRKYHVKVPNNKSLLYETKDAESNIKGSCKLEHTEKLRFFDKAAVEVESDHVKSSNNPWKLCTVTQVEELKSILRLLPVWATGILFSTVYSQMSTMFVLQGNTMDQHMGPNFKIPSASLSLFDTLSVIFWAPVYDRIIVPFARKFTGHERGFTQLQRMGIGLVISIISMIVAGILEVIRLNYVRKHNYYDLEYIPMSIFWQVPQYFLIGCAEVFTFIGQLEFYYDQAPDATRSLCSALSLTTNALGNYLSTLLVTIVNKVTTRNGKMGWIPDNMNRGHLDYFYWLLAILSLLNFLVYLWIAKWYTYKKVTGRPG

SEQ ID NO: 501 - protein, 586 aa, Arabidopsis thaliana
  REGION 113..518: note = Pfam Name: PTR2 Pfam Description: POT family
  REGION 1..586: note = Public GI ID no. 510238
  REGION 1..586: note = Bit score of 1169.8 for HMM based on sequences of Figure 11
  REGION 1..586: note = Functional Homolog Of SEQ ID NO. 426
MGSIEEEARPLIEEGLILQEVKLYAEDGSVDFNGNPPLKEKTGNWKACPFILGNECCERLAYYGIAGNLITYLTTKLHQGNVSAATNVTTWQGTCYLTPLIGAVLADAYWGRYWTIACFSGIYFIGMSALTLSASVPALKPAECIGDFCPSATPAQYAMFFGGLYLIALGTGGIKPCVSSFGADQFDDTDSRERVRKASFFNWFYFSINIGALVSSSLLVWIQENRGWGLGFGIPTVFMGLAIASFFFGTPLYRFQKPGGSPITRISQVVVASFRKSSVKVPEDATLLYETQDKNSAIAGSRKIEHTDDCQYLDKAAVISEEESKSGDYSNSWEDLCTVTQVEELKILIRMFPIWASGIIFSAVYAQMSTMFVQQGRAMNCKIGSFQLPPAALGTFDTASVIIWVPLYDRFIVPLARKFTGVDKGFTEIQRMGIGLFVSVLCMAAAAIVEIIRLHMANDLGLVESGAPVPISVLWQIPQYFILGAAEVFYFIGQLEFFYDQSPDAMRSLCSALALLTNALGNYLSSLILTLVTYFTTRNGQEGWISDNLNSGHLDYFFWLLAGLSLVNMAVYFFSAARYKQKKASS

SEQ ID NO: 502 - protein, 603 aa, Vitis vinifera
  REGION 120..528: note = Pfam Name: PTR2 Pfam Description: POT family
  REGION 1..603: note = Public GI ID no. 157341962
  REGION 1..603: note = Bit score of 1310.8 for HMM based on sequences of Figure 11
  REGION 1..603: note = Functional Homolog Of SEQ ID NO. 426
MKKKAEYINFWLEFAYYLSFQVKFKAGEEACTLDGTVDCRGNPAIRSRSGKWFAGIIILLNQGLATLAFFGVGVNLVLFLTRVLQQNNADAANNVSKWTGTVYIFSLVGAFLSDSYWGRYKTCAIFQVIFVIGLVSLSLSSYIFLVKPEGCGNEDSPCPSHSSLEIGLFYLSIYLVALGNGGYQPNIATLGADQFDEEDPKEGHSKVAFFSYFYLALNLGSLFSNTILSYLEDEGMWALGFWVSAGSAFLALILFLGGTPRYRHFKPSGNPLSRFCQVMVAAMRKFRVEMPPSAEDLYEGDGKECSNNSIRRILHTDGFKFLDRAAFISSKDSDNQEQGFYNQWRLCPITQVEEVKCILRLIPIWLCTIIYSVVFTQMASLFVEQGAAMKTTVSNFRIPPASMSSFDILSVAAFIFLYRRVLDPLVGRIRKTDTKGLTELQRMGIGLIIAIIAMIAAGIVECYRLKYAQKDCTNCEGSSSLSIFWQVPQYAFIGASEVFMYVGQLEFFNAQTPDGLKSFGSALCMTSISLGNYVSSLLVTMVMKISTEDHMPGWIPGNLNKGHLDRFYFLLATLTALDLVVYVACAKWYKCIKMEDRANEYGV

SEQ ID NO: 503 - protein, 559 aa, Prunus dulcis
  REGION 113..517: note = Pfam Name: PTR2 Pfam Description: POT family
  REGION 1..559: note = Public GI ID no. 6635838
  REGION 1..559: note = Bit score of 1117.9 for HMM based on sequences of Figure 11
  REGION 1..559: note = Functional Homolog Of SEQ ID NO. 426
  UNSURE 46: note = X is any aa, unknown, or other
MGSLEEERSLLEDGLIQDETNGLYTGDGSVDITGKPVLKQSTGNWXACPFILGTECCERLAFYGISTNLVTYLTHKLHEGNVSAARNVTTWSGTCYLTPLIGAVLADAYWGRYWTIAIFSTIYFIGMCTLTISASVPALKPPQCVDSVCPSASPAQYGVFFFGLYLIALRTGGIKPCVSSFGADQFDDTDSRERVKKGSFFNWFYFSINIGALVSSTLIVWVQDNAGWGLGFGIPALFMGIAIVSFFSGTPLYRFQKPGGSPLTRMCQVLVASFRKWNLDVPRDSSLLYETQDKGSAIKGSRKLEHSDELNCLDKAAVISETETKTGDFSNPWRICTVTQVEELKILIRMFPIWATGIVFSAVYAQMATMFVEQGMMMDTSVGSFTIPPASLSSFDVISVIFWVPIYDRFIVPIARKFTGKERGFSELQRMGIGLFLSVLCMSAAAVVEMKRLQLATELGLVDKEVAVPLSIFWQIPQYFLLGAAEIFTFIGQLEFFYDQSSDAMRSLCSALSASDDFIGKLSELFDSDIVTYFTTQGGKAGWIPDNLNDGHLDYFSGS

SEQ ID NO: 504 - protein, 576 aa, Arabidopsis thaliana
  REGION 87..496: note = Pfam Name: PTR2 Pfam Description: POT family
  REGION 1..576: note = Public GI ID no. 4455276
  REGION 1..576: note = Bit score of 1251.8 for HMM based on sequences of Figure 11
  REGION 1..576: note = Functional Homolog Of SEQ ID NO. 426
MDQKVRQFEVCTQDGSVDRHGNPAIRANTGKWLTAILILGVNLVLFLTRVMGQDNAEAANNVSKWTGTVYIFSLLGAFLSDSYWGRYKTCAIFQASFVAGLMMLSLSTGALLLEPSGCGVEDSPCKPHSTFKTVLFYLSVYLIALGYGGYQPNIATFGADQFDAEDSVEGHSKIAFFSYFYLALNLGSLFSNTVLGYFEDQGEWPLGFWASAGSAFAGLVLFLIGTPKYRHFTPRESPWSRFCQVLVAATRKAKIDVHHEELNLYDSETQYTGDKKILHTKGFRFLDRAAIVTPDDEAEKVESGSKYDPWRLCSVTQVEEVKCVLRLLPIWLCTILYSVVFTQMASLFVVQGAAMKTNIKNFRIPASSMSSFDILSVAFFIFAYRRFLDPLFARLNKTERNKGLTELQRMGIGLVIAIMAMISAGIVEIHRLKNKEPESATSISSSSTLSIFWQVPQYMLIGASEVFMYVGQLEFFNSQAPTGLKSFASALCMASISLGNYVSSLLVSIVMKISTTDDVHGWIPENLNKGHLERFYFLLAGLTAADFVVYLICAKWYKYIKSEASFSESVTEEEEV

SEQ ID NO: 505 - DNA, 1779 bp, Sorghum bicolor
  misc_feature 1..1779: note = Ceres Annot ID no. 8642246
  misc_feature 1..1779: note = Encodes the peptide sequence at SEQ ID NO. 506
  source 1..1779: mol_type = unassigned DNA
atggatgaggcaccagggctgctgttgcaagaagagggtggaggtagggaccacgaaccgctcctccttccacttccacaggatgctggcctttacacaggtgatggatctgttgatgtcaaagggtgtcctgcattaaagggcactacaggcaattggaaagcatgttttttcatcctagggaatgagtgttgtgaaaggctggcctactacggaattgcaaaaaacctagttacttatttgaaagtgaagcttcatctaggcaaccttgaggctgcaagacatgttaccacttggcaagggacatgctatcttactccccttgttggagccatcttagcagattctcattgggggaaatactggacaattgctgttttctcatcagtttactttattggcctggctattttgacgctgtcagcatcagtcccagcattgcagccaccttcatgtttaagaacagtttgtccagaagcaagcttacttcagtatggcgtattttttgttggtctctatatgatagccctagggacaggaggtatcaaaccttgtgtctcctcctttggagctgatcaatttgatgacactgacccagcagagagagctaagaagggctccttcttcaattggttctacttctgtataaatattggtgcattcatatcaggcactatcatagtgtggatacaagataacactggttggggaataggatttgcaattcctactatattcatggcattagctatttcattcttcctcacagcttcaaataagtacagattccaaaaacctggtgggagtccactcacaagagtgtgccaggtagttatagcagcatttcgtaagtggcacattgaagtgccacatgatacatctctcctctatgaagttgatggccaaacttcagcaattgagggaagccggaagctggagcacacaaatgagctcgagttccttgatagagctgccgttatctcatctgctgacctgaagagcgaatcctttacagacccatggaagctttgcacagttacccaggtggaagaattgaagattctaataagaatgtttcccgtttgggctactactatcatattcagtgctgtttacgcccaaaactcttccatgttcatagagcagggcatggttcttgacaagcgcattggatctttcaatattcctcctgcatctctctcaacttttgatgtaatcagcgtcatcatatgggttccactttatgaccgcattctggtgccagtagctagaaaattcactggaagggagaagggtttttctgagctccagcggatgggaattggattagccctgtcaattcttgcgatggtatctgcagctcttgttgagttgaagcgtttagagattgccaggtctgaaggtcttattcatgagaaggctgctgttccaatgagcattctttggcaaataccacaatatttcttggtgggtgctgctgaggtgtttacttgtataggtcaagtcgagttcttttacgatgaggccccagatgccatgaggagtttatgtagtgcatttgcacttattacagtctcactgggaagctatataagctccatcatactgacgttggtgtcgtgcattacaactcagggaggagatcctggatggatccctgacaatctgaatgaaggccatctcgaccggttcttttggttaattgctgggataagctttgtgaatttgatagtttacatgggctgtgctgtgagatacagatataagaaagcctcttga

SEQ ID NO: 506 - protein, 592 aa, Sorghum bicolor
  REGION 121..525: note = Pfam Name: PTR2 Pfam Description: POT family
  REGION 1..592: note = Ceres Annot ID no. 8642246
  REGION 1..592: note = Bit score of 1164.3 for HMM based on sequences of Figure 11
  REGION 1..592: note = Functional Homolog Of SEQ ID NO. 426
MDEAPGLLLQEEGGGRDHEPLLLPLPQDAGLYTGDGSVDVKGCPALKGTTGNWKACFFILGNECCERLAYYGIAKNLVTYLKVKLHLGNLEAARHVTTWQGTCYLTPLVGAILADSHWGKYWTIAVFSSVYFIGLAILTLSASVPALQPPSCLRTVCPEASLLQYGVFFVGLYMIALGTGGIKPCVSSFGADQFDDTDPAERAKKGSFFNWFYFCINIGAFISGTIIVWIQDNTGWGIGFAIPTIFMALAISFFLTASNKYRFQKPGGSPLTRVCQVVIAAFRKWHIEVPHDTSLLYEVDGQTSAIEGSRKLEHTNELEFLDRAAVISSADLKSESFTDPWKLCTVTQVEELKILIRMFPVWATTIIFSAVYAQNSSMFIEQGMVLDKRIGSFNIPPASLSTFDVISVIIWVPLYDRILVPVARKFTGREKGFSELQRMGIGLALSILAMVSAALVELKRLEIARSEGLIHEKAAVPMSILWQIPQYFLVGAAEVFTCIGQVEFFYDEAPDAMRSLCSAFALITVSLGSYISSIILTLVSCITTQGGDPGWIPDNLNEGHLDRFFWLIAGISFVNLIVYMGCAVRYRYKKAS

SEQ ID NO: 507 - DNA, 1764 bp, Sorghum bicolor
  misc_feature 1..1764: note = Ceres Annot ID no. 8633032
  misc_feature 1..1764: note = Encodes the peptide sequence at SEQ ID NO. 508
  source 1..1764: mol_type = unassigned DNA
atggccggcgccgagcgcgcggaggcggtcgctctggaggaagggctcctcgctccggaggaatccaaccaagtagtatacactggagatggatcagtcgacttttcgggaaatcctgttgtcaaggaaacaacgggtagatggaaggcatgtccattcatattaggtaatgaatgctgtgaacgactggcctattatggcatctccacgaaccttgtcacttacttgacaaaaaagctacatgctggcaatgcctctgctgctagcaatgtgactacatggcagggaacttgctacttgactccgcttattggggcaatcctggctgatgcatactgggggaggtattggacgattgcaacattctccacagtatacttcatcgggatgtcaatactgactctttcagcatcagttcctatgctcatgcctccatcttgtgaaggatccttttgcccacaagcaagcccttttcagtatactgtatttttccttggtctttatctgattgccctgggtactggtggaattaagccttgtgtctcatcctttggagcggatcaatttgatgatacagatccagctgagcgaatccagaagggttctttctttaattggttctatttttcaataaacattggtgctctcatatcaagcagctttctggtttgggtgcaagacaatgtaggatggggactgggctttggcattccgactgtattcatggggctggcaatcataagtttcttctctggcacatcactttataggttccaaaaaccaggaggtagtcctattacacgagtatgccaggtgattgttgcctctttgcgcaagtggaatgtgcctgccccagaggacagctctctcttgtatgagctacctaatggggtatcaacaattgaggggagtcggcaaatagagcacacagatgaactcagatgtttagacaaggctgctacagttaccgaagttgatgtgaaaatggctgacttcagcaacccatggcggatatgcactgtcacccaggtggaagaactgaagatactagtaaggatgttccctgtctgggcaacaacaatagtgttttctgctgtatatgctcaaatgtcgacaatgttcgtggaacaagggatggtgcttgacccatcgttgggttctttcaagattcctccagcttcactgtctacctttgacaccctaagtgtcatcgtatgtgtcccgatgtacgattacattgtggttccaatagccaggagattcaccggcaacgagaggggctttacagagttgcagaggatgggcattggcctggtcatttccatccttgctatgtcggtcgctgcaatcctcgaaatcaagcggctagcagttgccagggaagcacacctggtggatcagaatgtcccggtcccactgagcatattctggcaaatccctcagtatttcctgattggtctagcagagattttcacattcatcggagcgcttgagttcttttatgaccagtcaccagacgccatgaggagcctctgcagtgcacttaatcttctcactactgcgggtgggaactatctcagcacgttcattttgacaatggtcgcgtactttactacgaggggaggtaaccctggatggattcctgacaacttgaacgaagggcatcttgattacttcttctggctccttgctggcctcagttttctgaacctgattgtatatgtcatctgtgctggcaaatacaagggcaagaaggcagcttga

SEQ ID NO: 508 - protein, 587 aa, Sorghum bicolor
  REGION 116..520: note = Pfam Name: PTR2 Pfam Description: POT family
  REGION 1..587: note = Ceres Annot ID no. 8633032
  REGION 1..587: note = Bit score of 1219.7 for HMM based on sequences of Figure 11
  REGION 1..587: note = Functional Homolog Of SEQ ID NO. 426
MAGAERAEAVALEEGLLAPEESNQVVYTGDGSVDFSGNPVVKETTGRWKACPFILGNECCERLAYYGISTNLVTYLTKKLHAGNASAASNVTTWQGTCYLTPLIGAILADAYWGRYWTIATFSTVYFIGMSILTLSASVPMLMPPSCEGSFCPQASPFQYTVFFLGLYLIALGTGGIKPCVSSFGADQFDDTDPAERIQKGSFFNWFYFSINIGALISSSFLVWVQDNVGWGLGFGIPTVFMGLAIISFFSGTSLYRFQKPGGSPITRVCQVIVASLRKWNVPAPEDSSLLYELPNGVSTIEGSRQIEHTDELRCLDKAATVTEVDVKMADFSNPWRICTVTQVEELKILVRMFPVWATTIVFSAVYAQMSTMFVEQGMVLDPSLGSFKIPPASLSTFDTLSVIVCVPMYDYIVVPIARRFTGNERGFTELQRMGIGLVISILAMSVAAILEIKRLAVAREAHLVDQNVPVPLSIFWQIPQYFLIGLAEIFTFIGALEFFYDQSPDAMRSLCSALNLLTTAGGNYLSTFILTMVAYFTTRGGNPGWIPDNLNEGHLDYFFWLLAGLSFLNLIVYVICAGKYKGKKAA

SEQ ID NO: 509 - protein, 570 aa, Vitis vinifera
  REGION 87..485: note = Pfam Name: PTR2 Pfam Description: POT family
  REGION 1..570: note = Public GI ID no. 157337654
  REGION 1..570: note = Bit score of 1166.2 for HMM based on sequences of Figure 11
  REGION 1..570: note = Functional Homolog Of SEQ ID NO. 426
MMGAFQFQGFITGNATGGWKSASLLLANQGLATLAFFGVGVNLVLFLTRVLSQDNANAANSVSKWTGTVYLCSLIGAFLSDSYWGRYLTCAIFQVILVLGLLLLSLSSWLFLIEPKGCGDRTTLCSPSSSVGLGVFYSSIYLVAFGYGGHQPTLATLGADQFDETNPREMNSKTVFFSYFYFALNLGSLFSNTILVYFEDSGKWTLGFLVSTGSAIIALVIFLCGSSGYRHIKPCGNPLPRVAQVFVAAFRKWDVVVPENGDGLYELEGSESAIKGSRKILHSNEIEFLDKAATMIEADMVDPNPWRLCTVTQVEEAKCVIKMLPIWLCTIIYSVIFTQMASLFVEQGDVMNRKIGNFEIPAASMSAFDIFSVLLCTGIYRQILVPISGKLTGNPKGMSELQRMGIGLIIGIAAMIAAGLTELGRLRRVSPNEEASSLSIFWQTPQYVLVGASEVFMYVGQLEFFNGQAPDGIKSLGSSLCMASISLGNYVSSLLVNIVMGVTTRGDNPGWIPEDLNTGHLDRFYFLIAVLTVIDFVIYVFCAKWYKSINLESFEKKKDQEDGHAVDEGK

SEQ ID NO: 510 - DNA, 1770 bp, Sorghum bicolor
  misc_feature 1..1770: note = Ceres Annot ID no. 8642241
  misc_feature 1..1770: note = Encodes the peptide sequence at SEQ ID NO. 511
  source 1..1770: mol_type = unassigned DNA
atggagtcatcgctggaggaggagcggcggcagaacctgctgctgcgcgcgacggagccgccagaggatcttgccgttgccgggtacacaggtgatggatcagttgactttagaggttttcctattttaaagcataacacagggaactggagagcatgttcattgattcttggaactgaaatatgtgaacgtttggcctactatggaatctcaaaaagtttggtcacttacctttcaacaaggctacatgaaggaaatgtctctgctgcgaggaacttcacaacctggcaaggaacttgttatcttacaccacttattggagcaaccttagcagattcgtactggggaaagtacaggactattgctgttttctccactatttactttcttgggatggcggcattgacactttcagcatcagttccttctttccagccccctcaatgtgttgggtctatttgtccacaaccgaccttacctcagtaccttatatactttgttggattatacatgattgctttgggagctggtggtataaagccatgtgtttcgtcctttggggctgaccaattcgatgatactgatccagttgagaaaacaaagaaaggcgctttcttcaattggttttatttctgcataaatattggttctttgatctctggcacagttcttatttgggtacaagagaattatggatatggcattggatttgggatccctacttttttcattgccttggctattggaagcttttttataggttcagaaaggtatagatttcagataccgggaggaagcccacttacaagagcatgtcaggtagttgtggcagccactcacaagcgaaaagcggatttgccagttgacagttctcttctctatgagctagatggtaagacttcagctattgaggggagtcgtaagctggagcacagtagtgaattcagtttccttgacaaagctgcagtcgttttgtggaatgaacatgatggttctcgcaatccatggagactttgcacagtcacacaagttgaagagcttaaaatattactgaggatgtttccaatctgggcaacaggaattgtgttcttcaccgtatgtgctcaaaactcatcgatgttcatagaacaagggatggccctcgataaccaaattggttctttcaagattccagcagcaactctgtcatccctagatgttatcagtattgttgtttgggttccaatttatgagagattagttgtgcccatagccaggagattcagtggaaaagagagaggtttctcagaacttcaacggatgggaattggtctatttgtatctacagttgcagtggcagttgcagcattagtcgagatcaagcgtctgcaggtcgcaagagcagaggatctggttcatcagaaggtacctgttcctatgagcatcctttggcaagcaccacagtacttgctggttggcgtgggcgaggtgttcacatcaatcggtcaagctgagtttttctacaatcagtcaccagacgccatgagaagcctatgctcagctttcgctcttgttaccgtgtcacttggaagttatctcagctcattcatcttgaccctggtgtcatatttcacaactcgaaatgggcaattggggtggatccctgataacttaaacgaaggccatcttgaccgttttttctggctgatagctggtctcagctctttaaatttccttgtttttatatattacgctcaacaatacaagtgcaagagagcctctgttgcttaa

SEQ ID NO: 511 - protein, 589 aa, Sorghum bicolor
  REGION 118..520: note = Pfam Name: PTR2 Pfam Description: POT family
  REGION 1..589: note = Ceres Annot ID no. 8642241
  REGION 1..589: note = Bit score of 1075.0 for HMM based on sequences of Figure 11
  REGION 1..589: note = Functional Homolog Of SEQ ID NO. 426
MESSLEEERRQNLLLRATEPPEDLAVAGYTGDGSVDFRGFPILKHNTGNWRACSLILGTEICERLAYYGISKSLVTYLSTRLHEGNVSAARNFTTWQGTCYLTPLIGATLADSYWGKYRTIAVFSTIYFLGMAALTLSASVPSFQPPQCVGSICPQPTLPQYLIYFVGLYMIALGAGGIKPCVSSFGADQFDDTDPVEKTKKGAFFNWFYFCINIGSLISGTVLIWVQENYGYGIGFGIPTFFIALAIGSFFIGSERYRFQIPGGSPLTRACQVVVAATHKRKADLPVDSSLLYELDGKTSAIEGSRKLEHSSEFSFLDKAAVVLWNEHDGSRNPWRLCTVTQVEELKILLRMFPIWATGIVFFTVCAQNSSMFIEQGMALDNQIGSFKIPAATLSSLDVISIVVWVPIYERLVVPIARRFSGKERGFSELQRMGIGLFVSTVAVAVAALVEIKRLQVARAEDLVHQKVPVPMSILWQAPQYLLVGVGEVFTSIGQAEFFYNQSPDAMRSLCSAFALVTVSLGSYLSSFILTLVSYFTTRNGQLGWIPDNLNEGHLDRFFWLIAGLSSLNFLVFIYYAQQYKCKRASVA

SEQ ID NO: 512 - DNA, 1734 bp, Populus balsamifera
  misc_feature 1..1734: note = Ceres Annot ID no. 1520085
  misc_feature 1..1734: note = Encodes the peptide sequence at SEQ ID NO. 513
  source 1..1734: mol_type = unassigned DNA; note = Populus balsamifera subsp. trichocarpa
atgaacaaaaataatggactccacacaggagatggctcggtcgacattaatgggacggctgttcttaagcagaaaactggaaattggagagcatgctctttcatattgggaaatgaatgctgtgaacgcttggcctactatggaattgctactaatctggtctcctaccttactgggaagctacatgaaggaaatgtgtcagctgcaaaaaatgttaacatttgggcaggaacttgctacttcacaccactcattggagccactttggcagatgcttattggggaagatattggaccatttctgttttctccacaatttacttcattggaatgtgtacgttgactctctcagcaactattcctgtattaaagccagctgaatgtataggttctctatgccctccagcaactcctgctcagtatggggtattcttttttggcctctatctgattgcatttgggacaggtggcatcaaaccatgtgtttcatcctttggggcggatcagtttgatgacactgatcctaaggaaagggtaaagaaggggtccttcttcaattgtttctatttttcaatcaacattggttgtcttgtatcaagtagtttaatggtatacattcaagacaaagctgggtgggggctaggatttggaattcctgcattgttcatgggcatagctattgctatcttcttttcaggcacgcccctttatagatttcagaggccagtggggagcccaattactagaatgtgccaagttgtggttgcgtcattccataagaggaatttggaggttccccaagacattagtctcctatatgaaacccaagaaaaacactcaaccattgagggaacctggaaactagcgcacagcaatgaattgaaatgccttgataaagctgctataatttcagaggctgagataaaaggtggggacttcagtgatccatggaggctttgtactatgactcaggtggaggaattgaagattttgatccgcatgtttccgatctgggctacaggcattgtcttttctgctgcccatgcccaaatgagtacaatctttgtggaacaagggatgctgatggacaagacaattggttctttcaacatccctcctgcttctatgatcacaattgatgttattagtgttattttctgggttccaatctatgataggatcattgttccaattgcaaggaagttcactggcagagagaggggcttttcagagttgcagcgtatgggaattggcttgttcatttctatgctatcaatgacagctgctgctttgctagagattaagcgcttgcagcttgtaaaagagcttggattggttggtgatgctgttgcagttcctctcagtatcttgtggcaaattccccagtatatgttgatgggtacagcagagatctttacatccattggtcagcttgaatttttctatgaacagtctccagatgccatgcggagtctatgcagtgctttgtcactcctggctgcatctttgggtaattacctgagctcttttattctgagcatggtaacttacctcacaaccacgggtgggaagacaggatggataccagataacttaaataaggggcaccttgattatttattctggcttttggctgggctcagcttcttcaacttgctgatctacactatttgtgcaaagagatttataaagagaagaaggcctcctaaggtttttacaagaggggaggcctag

SEQ ID NO: 513 - protein, 577 aa, Populus balsamifera
  REGION 97..501: note = Pfam Name: PTR2 Pfam Description: POT family
  REGION 1..577: note = Ceres Annot ID no. 1520085
  REGION 1..577: note = Bit score of 1157.8 for HMM based on sequences of Figure 11
  REGION 1..577: note = Functional Homolog Of SEQ ID NO. 426
  source 1..577: note = Populus balsamifera subsp. trichocarpa
MNKNNGLHTGDGSVDINGTAVLKQKTGNWRACSFILGNECCERLAYYGIATNLVSYLTGKLHEGNVSAAKNVNIWAGTCYFTPLIGATLADAYWGRYWTISVFSTIYFIGMCTLTLSATIPVLKPAECIGSLCPPATPAQYGVFFFGLYLIAFGTGGIKPCVSSFGADQFDDTDPKERVKKGSFFNCFYFSINIGCLVSSSLMVYIQDKAGWGLGFGIPALFMGIAIAIFFSGTPLYRFQRPVGSPITRMCQVVVASFHKRNLEVPQDISLLYETQEKHSTIEGTWKLAHSNELKCLDKAAIISEAEIKGGDFSDPWRLCTMTQVEELKILIRMFPIWATGIVFSAAHAQMSTIFVEQGMLMDKTIGSFNIPPASMITIDVISVIFWVPIYDRIIVPIARKFTGRERGFSELQRMGIGLFISMLSMTAAALLEIKRLQLVKELGLVGDAVAVPLSILWQIPQYMLMGTAEIFTSIGQLEFFYEQSPDAMRSLCSALSLLAASLGNYLSSFILSMVTYLTTTGGKTGWIPDNLNKGHLDYLFWLLAGLSFFNLLIYTICAKRFIKRRRPPKVFTRGEA

SEQ ID NO: 514 - DNA, 1713 bp, Populus balsamifera
  misc_feature 1..1713: note = Ceres Annot ID no. 1514979
  misc_feature 1..1713: note = Encodes the peptide sequence at SEQ ID NO. 515
  source 1..1713: mol_type = unassigned DNA; note = Populus balsamifera subsp. trichocarpa
atggcagaggaggatgtttatacaaaagatggaactgtggattatctggggaatcctgctaacagaaaggagactggaacctggagggcctgcccttttattataggaaatgaattttgtgaacgattggcgtactatgggatgagctccaatctggttctttatttcaagcacagactgaaccagagcagtgctacagctactagaaataacttgaactggggtggaacatgctatctcactccattgatcggagcattcgttgctgatgcttatctaggaagatattggacgattgctagtttctcaaccatttatgttgcagggatgacgcttttgacaatgtcagcaactgtccatggcctcaggccagaatgttattcaaaagatcattgccatccaacaggtggtcaaactgctgtaactttcgtagcactttacctgatagcacttggcacaggaggtattaagccttgtgtctcatcctatggagcagatcagtttgatgatgctgacgaaactgagaagaaacacaagagttcattctttaactggttctacctctcgattaatgttggtgctcttattgccggttctgtgctggtttggatacaagataatgtgagttggggatggggttttggcattccagcaatagccatggcaattgctgttgtgagcttcttttcaggtaccaagttgttcaggtatcaaaagcctggaggcagccctcttacacgcatctgtcaggtgctggtggcatccttcagaaaacagaaagttgaagttcctgctgacaagtctctgttgcatgagactgcagatgccgaatccaacatcaaaggaagccgcaagctcgaccatactgaagaatttagtttccttgacaaggcagcagtagaaacagaaaaggacgacataaaagggacaggagacccatggaatctttgcacagtaacccaggtcgaggagctaaaggctatcattcggttgcttcctatatgggccactggtatcatcttttctgcagtgtacagccaaatggggaacttatttgtgctgcaaggtgaaacaatggataaatttgttggaaactccactttcgagataccatctgcatctttatccatctttgacacccttagtgtcattttttgggtccctgtgtatgaccgaattatcgtcccagttgcaagaaaattcactggacataaaaacggcttaactcaactgcagcggatgggcattggtctattcatatcaatatttgccatggtatctgcagcaatcttggaacttaaaagactgcaaatggtgagaaataacaactactacgaacttgattccgtgcccatttctatattttggcaagttccacagtatttcctgataggctgtgccgaagttttcacgttcatcggacaattggaattcttctacgaacaagcacctgatgcaatgaggagcatgtgttctgccctgtcactcaccaccgtcgcacttggcaattacttaagctctcttctggtaaccattgttacaaccatcagcactaagaatggaaaggctggatggattccggacaacttaaattacggtcacattgattacttcttctggctactaggaatgctcagtgtgctgaatttaggtgcctttctcttgatctcaaattggtacacttataaaaaggctataggaactcttcgttga

SEQ ID NO: 515 - protein, 570 aa, Populus balsamifera
  REGION 96..499: note = Pfam Name: PTR2 Pfam Description: POT family
  REGION 1..570: note = Ceres Annot ID no. 1514979
  REGION 1..570: note = Bit score of 1132.8 for HMM based on sequences of Figure 11
  REGION 1..570: note = Functional Homolog Of SEQ ID NO. 426
  source 1..570: note = Populus balsamifera subsp. trichocarpa
MAEEDVYTKDGTVDYLGNPANRKETGTWRACPFIIGNEFCERLAYYGMSSNLVLYFKHRLNQSSATATRNNLNWGGTCYLTPLIGAFVADAYLGRYWTIASFSTIYVAGMTLLTMSATVHGLRPECYSKDHCHPTGGQTAVTFVALYLIALGTGGIKPCVSSYGADQFDDADETEKKHKSSFFNWFYLSINVGALIAGSVLVWIQDNVSWGWGFGIPAIAMAIAVVSFFSGTKLFRYQKPGGSPLTRICQVLVASFRKQKVEVPADKSLLHETADAESNIKGSRKLDHTEEFSFLDKAAVETEKDDIKGTGDPWNLCTVTQVEELKAIIRLLPIWATGIIFSAVYSQMGNLFVLQGETMDKFVGNSTFEIPSASLSIFDTLSVIFWVPVYDRIIVPVARKFTGHKNGLTQLQRMGIGLFISIFAMVSAAILELKRLQMVRNNNYYELDSVPISIFWQVPQYFLIGCAEVFTFIGQLEFFYEQAPDAMRSMCSALSLTTVALGNYLSSLLVTIVTTISTKNGKAGWIPDNLNYGHIDYFFWLLGMLSVLNLGAFLLISNWYTYKKAIGTLR

SEQ ID NO: 516 - protein, 587 aa, Vitis vinifera
  REGION 113..521: note = Pfam Name: PTR2 Pfam Description: POT family
  REGION 1..587: note = Public GI ID no. 147858202
  REGION 1..587: note = Bit score of 1351.3 for HMM based on sequences of Figure 11
  REGION 1..587: note = Functional Homolog Of SEQ ID NO. 426
MASMACLNIFQKGRGKTRNEQEECTFDGSVDRHGHPAVRARTGNWVTAILILVNQGLATLAFFGVGVNLVLFLTRVLGQDNATAANNVSKWTGTVYIFSLLGAFLSDSYWGRYKTCAIFQVIFVIGLVLLSLSSYIFLLKPNGCGDKEFPCGSHSTFEISFFYLSIYLIALGNGGYQPNIATFGADQFDEDNPKESHSKVAFFSYFYLALNLGSLFSNTILGYFEDGGRWVLGFWASSASAILALILFLFGIPRYRHFKPSGNPLSRFCRVVVAATRKWKVEMPPEGEDLYEVDGDDCSGNCRRKMLHTQGFKFLDKAAVLTAKEREQEDKESRSPWRICTVTQVEEVKCILRLLPIWLCTILYSVVFTQMASLFVEQGAAMKTTLLGFHIPPASMSSFDIVSVAAFIFIYRRVLDPLVARLKGTKARGLTELQRMGIGLIIAIIAMVAAGIVEWFRLKYAKKDCRQCESESSLSIFWQIPQYVLIGASEVFMYVGQLEFFNDQAPDGLKSFGSALCMTSISLGNYVSSLLVTIVMKFSTRDQMPGWIPSNLNKGHLDRFYFLLAALTMADFGVYIICAKVVTSPSS

SEQ ID NO: 517 - protein, 574 aa, Oryza sativa
  REGION 122..507: note = Pfam Name: PTR2 Pfam Description: POT family
  REGION 1..574: note = Public GI ID no. 125545538
  REGION 1..574: note = Bit score of 1153.0 for HMM based on sequences of Figure 11
  REGION 1..574: note = Functional Homolog Of SEQ ID NO. 426
  source 1..574: note = Oryza sativa subsp. indica
MAEVTVVRAEREEESTLEQGLLAIPEESNQLTYTGDGSVDFSGNPVVKERTGRWRACPFILGNECCERLAYYGISTNLVTYLTKKLHDGNASAASNVTAWQGTCYLTPLIGAILADAYWGRYWTIATFSTIYFIGMAVLTLSASVPTFMPPPCEGSFCPPANPLQYTVFFLGLYLIALGTGGIKPCVSSFGADQFDDTDPVERIQKGSFFNWFYFSINIGALISSSFLVWVQDNIGWGIGFGIPTIFMGLAIISFFSGTSLYRFQKPGGSPITRVCQVVVASFRKWNVHVPEDSSRLYELPDGASAIEGSRQLEHTDELRCLDKAATITDLDVKADSFTNPWRICTVTQVEELKILMSTMFVEQGMMLDTSVGPFKIPPASLSTFDVVSVIIWVPLYDSILVPIARRFTGNPRGFTELQRMGIGLVISIFSMAAAAVLEIKRLDIARAEHLVDQNVPVPLNICWQIPQYFLVGASEVFTFVGSLEFFYDQSPDAMRSLCSALQLVTTALGNYLSAFILTLVAYFTTRGGNPGWIPDNLNQGHLDYFFWLLAGLSFLNFVIYVICANKYKSKKAA

SEQ ID NO: 518 - protein, 591 aa, Oryza sativa
  REGION 121..525: note = Pfam Name: PTR2 Pfam Description: POT family
  REGION 1..591: note = Public GI ID no. 115451771
  REGION 1..591: note = Bit score of 1131.5 for HMM based on sequences of Figure 11
  REGION 1..591: note = Functional Homolog Of SEQ ID NO. 426
  source 1..591: note = Oryza sativa subsp. japonica
MEEAAEDRRLQVREEGGDQEPLLLLPQDANLYTGDGSVDIKGRPALKHATGNWRACFFILGDECCERLAYYGIAKNLVTYLKTNLHQGNLEAARNVTTWQGTCYLTPLIGALLADSYWGKYWTIAAFSAIYFIGLVALTLSASVPALQPPKCSGSICPEASLLQYGVFFSGLYMIALGTGGIKPCVSSFGADQFDDSDPADRVKKGSFFNWFYFCINIGAFVSGTVIVWIQDNSGWGIGFAIPTIFMALAIASFFVASNMYRFQKPGGSPLTRVCQVVVAAFRKWHTEVPHDTSLLYEVDGQTSAIEGSRKLEHTSELEFFDKAAIISSDDAKSDSFTNPWRLCTVTQVEELKILIRMFPIWATTIIFNAVYAHNSSMFIEQGMVLDKRVGSFIVPPASLSTFDVISVIIWIPFYGRVLVPIARKFTGREKGFSELQRIGIGLALSILAMLSAALVELRRLGIARSEGLIHEDVAVPMSILWQIPQYFLVGAAEVFAAIGQVEFFYNEAPDAMRSLCSAFALVTVSLGSYLSSIILTLVSYFTTQGGDPGWIPDNLNEGHLDRFFSLIAGINFVNLLVFTGCAMRYRYKKA

SEQ ID NO: 519 - protein, 574 aa, Oryza sativa
  REGION 122..507: note = Pfam Name: PTR2 Pfam Description: POT family
  REGION 1..574: note = Public GI ID no. 125587732
  REGION 1..574: note = Bit score of 1153.1 for HMM based on sequences of Figure 11
  REGION 1..574: note = Functional Homolog Of SEQ ID NO. 426
  source 1..574: note = Oryza sativa subsp. japonica
MAEVTVVRAEPQEGSTLEQGLLAIPEESNQLTYTGDGSVDFSGNPVVKERTGRWRACPFILGNECCERLAYYGISTNLVTYLTKKLHDGNASAASNVTAWQGTCYLTPLIGAILADAYWGRYWTIATFSTIYFIGMAVLTLSASVPTFMPPPCEGSFCPPANPLQYTVFFLGLYLIALGTGGIKPCVSSFGADQFDDTDPVERIQKGSFFNWFYFSINIGALISSSFLVWVQDNIGWGIGFGIPTIFMGLAIISFFSGTSLYRFQKPGGSPITRVCQVVVASFRKWNVHVPEDSSRLYELPDGASAIEGSRQLEHTDELRCLDKAATITDLDVKADSFTNPWRICTVTQVEELKILMSTMFVEQGMMLDTSVGPFKIPPASLSTFDVVSVIIWVPLYDSILVPIARRFTGNPRGFTELQRMGIGLVISIFSMAAAAVLEIKRLDIARAEHLVDQNVPVPLNICWQIPQYFLVGASEVFTFVGSLEFFYDQSPDAMRSLCSALQLVTTALGNYLSAFILTLVAYFTTRGGNPGWIPDNLNQGHLDYFFWLLAGLSFLNFVIYVICANKYKSKKAA

SEQ ID NO: 520 - DNA, 1755 bp, Populus balsamifera
  misc_feature 1..1755: note = Ceres Annot ID no. 1516968
  misc_feature 1..1755: note = Encodes the peptide sequence at SEQ ID NO. 521
  source 1..1755: mol_type = unassigned DNA; note = Populus balsamifera subsp. trichocarpa
atggctaagattaacaagtatccagtccttgtcagtttcgtattatatttccaggatgaaagcaatggactctacacaggagatggctcagttgacattaatgggaaccctgtccttaagcagaaaactggaaactggaaagcatgccctttcatactgggtactgaatgttgtgaacgcctggcctactatgggattgctactaatctcgtcacttaccttaccaagaagctacatgaaggaaatgtgtcggctgcaagaaatgttaccacctggtcagggacatgctatcttacacccctcatcggagctgtattagcagatacttgttggggaagatattggactattgctgctttctcctcaatttacttcattggaatgtgtgcgttgactctctcagcatctattcctgcattaaagccagctgaatgcgtaggttctctgtgccctccagcaactccagctcagtatgcagtattcttttttggcctctatctgattgcgcttgggacgggtggcatcaaaccatgtgtttcatcctttggggcagatcaatttgatgacactgatcccaaggaacgggtaaagaagggatctttcttcaattggttctatttttcaatcaatattggtgctcttatatcaagtagttttctggtatatattcaagacaatgccggttggggactaggatttggaattcctgcactgttcatgggcatagctattgctagcttcttttcaggcacacccctttacagatttcaaagaccaggggggagccctattacaaggatgtgccaagttttggttgcatcattccataagtggaatctggaggttcctctagacagtagcctcctgtatgaaacacaagacaaacactctgccattgaaggaagccggaaactggtgcacagcgatgaactaaagtgccttgataaagctgctgtgctgtcagaggctgagatgaaaagtggggacttccccaacccttggaggctttgtactgtcacgcaggtggaggaattgaagattttgatccgcatgtttccaatctgggctacaggaattgtcttttccgctgtgtatgcccagatgtctactatgtttgtggaacaagggatgctgatggacacgacaattggttctttcacaattcctccagcatctctgtcatcctttgatgttattagtgttatttgctgggtgccaatctatgataggattgttgttcccattgcaaggaagttcacaggaaaagagaggggcttctcagatttgcagcgtatgggaattggcctgttcatttcagtgttatcaatgacagctgctgctttggtggagattaagcgcctacagcttgcgaaagagcttggcttggctggtgaagctgttgcagtgcctatcagtattttttggcagatcccccaatatatgttggtaggtgcttcagaagtttttacattcattggtcagattgaattcttctatgaagaatctccagatgcaatgcggagtttatgcagtgcgttgtcactcctgactacgtctttgggtaattacttgagctcttttattctgactatggtaacttacttcacaaccacgggtgggaagccaggatggatccccgataacttgaatgagggccacctcgattatttcttctggcttttagctggactcagcgttctcaacatgctggtctatgttttctgtgcgaggaaatataagcagaaggcctcctaa

SEQ ID NO: 521 - protein, 584 aa, Populus balsamifera
  REGION 114..518: note = Pfam Name: PTR2 Pfam Description: POT family
  REGION 1..584: note = Ceres Annot ID no. 1516968
  REGION 1..584: note = Bit score of 1250.0 for HMM based on sequences of Figure 11
  REGION 1..584: note = Functional Homolog Of SEQ ID NO. 426
  source 1..584: note = Populus balsamifera subsp. trichocarpa
MAKINKYPVLVSFVLYFQDESNGLYTGDGSVDINGNPVLKQKTGNWKACPFILGTECCERLAYYGIATNLVTYLTKKLHEGNVSAARNVTTWSGTCYLTPLIGAVLADTCWGRYWTIAAFSSIYFIGMCALTLSASIPALKPAECVGSLCPPATPAQYAVFFFGLYLIALGTGGIKPCVSSFGADQFDDTDPKERVKKGSFFNWFYFSINIGALISSSFLVYIQDNAGWGLGFGIPALFMGIAIASFFSGTPLYRFQRPGGSPITRMCQVLVASFHKWNLEVPLDSSLLYETQDKHSAIEGSRKLVHSDELKCLDKAAVLSEAEMKSGDFPNPWRLCTVTQVEELKILIRMFPIWATGIVFSAVYAQMSTMFVEQGMLMDTTIGSFTIPPASLSSFDVISVICWVPIYDRIVVPIARKFTGKERGFSDLQRMGIGLFISVLSMTAAALVEIKRLQLAKELGLAGEAVAVPISIFWQIPQYMLVGASEVFTFIGQIEFFYEESPDAMRSLCSALSLLTTSLGNYLSSFILTMVTYFTTTGGKPGWIPDNLNEGHLDYFFWLLAGLSVLNMLVYVFCARKYKQKAS

SEQ ID NO: 522 - DNA, 2468 bp, Zea mays
  misc_feature 1..2468: note = Ceres Clone ID no. 350844
  misc_feature 1..2468: note = Encodes the peptide sequence at SEQ ID NO. 523
  source 1..2468: mol_type = unassigned DNA
atgatcggagctctataaatcgccccaaccccctccctcgttctgccaccattgccatatcctcgatcacaagagcagctactagctgcctctagctcgatcggttagtttgtcgtgttgcttacgtacgtcagcagaggccatcgtcgagtgtatccagtggtcgagaagagggaagaaatgtctgcgaacgacggcgccggcgacacgaagatgagggcgatcgtcgtcgtagaggaaggggagatgagcgcgccggcggcgacgccgaagcagggcaagtgctgcgagtacacgctggacggctccgtcgacatgaagggccggccggcggtcaaggggaaatcaggagggtggcttgccggtgctctaatcctcgtgaaccagggcctggcgacgctggctttcttcggcgtgaacgtgaacctggtgctgttcctgacccgggtgctggggcagagcaatggcgacgccgccaacaacgtcagcaagtggacgggcaccgtgtacatgttctccctcatcggcgccttcctcagcgactcctattggggacgctacaagacctgcgccatcttccaggccatctttgtcctcggcctcgcgctgctgtcggtgtcgtcgcacctctacctaatcaggccggacgggtgcggcatggagcacgcgccctgcggcccgcactccggcaaggagctggggatcttctacatcgcgctgtacatgatcgccttcggcaacggcgggtaccagcccaacatcgccaccctgggcgccgaccagttcgacgaggaggaccccgccgaggcgcactccaaggtctccttcttcagctacttctacctcgccctcaacctcggctcgctcttctccaacaccttcctcagctacctcgaggacaagggcagctgggcgctcggcttctgggcctccaccgccgccgccgccacagcgctcctgcttttcctcagcggcacgctccggtaccgctatttccagcccggagggaacccgatcggaaggattggccaggtcgccatcgccgcgtgcaggaactggaaggcgggcgtgtcgaccgaagtggtaagcctgtacgagggcgacgagaaggcggatgccggtggcaggaagcttctgcacacgcaagggttcagtttcttggaccgcgcggcgcacgcggacactgactccaagctcggcgcgcgcgatccctggaagctgtgctcggtgacgcaggtggaggaggtcaagagcatcctgaggctcctccccatctggctctgcaccatcctctactccgttgtcttcacccagatggcctcgctctttgtcgtgcagggcgccgcgatgcgccgcaccaccccgttctccggcttctccgtcccgccctccagcatgtcggccttcgacattctcacagtcgccgccacgattttcctgtaccgccgcactatctgcccgttcctagcgcggctcagcggccgcccggctggccccaccgagctgcagaggatgggcctcggcctggtcgtgggtgccctggccatgaccacggccgggacggtcgagcacttccggaaggccagggccaccgcagcgatgagcagcgacctgcatatcatgtggcaggtgccgcagtatgcgctgatcggcgtgtcggaggtgatgatgtacgtcgggcagctcgagttcttcaacggccagatgcccgacgggctcaaaagcttcggaagtgccttgtgtatgatgtccatgtcgctcggcaactacttcagtgacatcatcgtgagcgcggtgaccaggctcaccacgacgcgagggcggtccgggtggatcccggctgacctcaacgaggggcacctcgacaagttctacttcctgctcgccgtgctggccgtcgcggacttcgcggtgtacctcgtatgcgcgagccgctacgggagcggcaaagtggacgggaggagcagcgacgacgaggaggagggagcggccggtcaggtgacatccccggcttacgcatgaccatcaccggccgcccggccggcgggcatcgtacgtatgttgttcttgtcttcttgaggtggaggctggcaggctgcaaatctcgagggccattggttatttggttgacggagttcttccattgacgacgatagcacaagcatggggcgagcatggacatagtgatatgactaattaaagaataagcacttaagcaggactagctaaacactacatgctgcagcatcatgctcgcggtttttggccagtgtaacaacagacgacgattgttactgaccacgactgttctttgcgtggtctacagagttcgcttctgcaaaattcaataatgggcgagtgctgtatcatataaagtcgcaggttgcgccacgtagctacgatgtgactaacaaacaaatatgtattcaagttatgtattaaacggttaaccgtgtctttttaccgtt

SEQ ID NO: 523 - protein, 613 aa, Zea mays
  REGION 127..525: note = Pfam Name: PTR2 Pfam Description: POT family
  REGION 1..613: note = Ceres Clone ID no. 350844
  REGION 1..613: note = Bit score of 1244.1 for HMM based on sequences of Figure 11
  REGION 1..613: note = Functional Homolog Of SEQ ID NO. 426
MSANDGAGDTKMRAIVVVEEGEMSAPAATPKQGKCCEYTLDGSVDMKGRPAVKGKSGGWLAGALILVNQGLATLAFFGVNVNLVLFLTRVLGQSNGDAANNVSKWTGTVYMFSLIGAFLSDSYWGRYKTCAIFQAIFVLGLALLSVSSHLYLIRPDGCGMEHAPCGPHSGKELGIFYIALYMIAFGNGGYQPNIATLGADQFDEEDPAEAHSKVSFFSYFYLALNLGSLFSNTFLSYLEDKGSWALGFWASTAAAATALLLFLSGTLRYRYFQPGGNPIGRIGQVAIAACRNWKAGVSTEVVSLYEGDEKADAGGRKLLHTQGFSFLDRAAHADTDSKLGARDPWKLCSVTQVEEVKSILRLLPIWLCTILYSVVFTQMASLFVVQGAAMRRTTPFSGFSVPPSSMSAFDILTVAATIFLYRRTICPFLARLSGRPAGPTELQRMGLGLVVGALAMTTAGTVEHFRKARATAAMSSDLHIMWQVPQYALIGVSEVMMYVGQLEFFNGQMPDGLKSFGSALCMMSMSLGNYFSDIIVSAVTRLTTTRGRSGWIPADLNEGHLDKFYFLLAVLAVADFAVYLVCASRYGSGKVDGRSSDDEEEGAAGQVTSPAYA

SEQ ID NO: 524 - DNA, 1746 bp, Sorghum bicolor
  misc_feature 1..1746: note = Ceres Annot ID no. 8658700
  misc_feature 1..1746: note = Encodes the peptide sequence at SEQ ID NO. 525
  source 1..1746: mol_type = unassigned DNA
atgggagaggtcgcggacatgtacacccaagacgggacggtggacaggaaggggaatcccgccctgaagaaggacaccggcaactggagggcatgcccctacatcctcgcgaacgagtgctgcgagaggctggcctactatggcatgagcaccaaccttgttcactacatgaagacccggcttggccaggtgaacagcgtcgcctccaacaacgtcaccaactggtcagggacgtgctacatcacgccactcatcggcgccttcttcgccgacgcgtacctggggaggttctggaccatcgccagcttcatggtcatctacattttcggactggcgctgctgacgatggcgtcgtcggtgaaggggctggtgcctacgtcgtgtgacaatgacggcgtgtgccacccgacggacgcgcagtcggcggtggtgttcgtggcgctgtacctgatcgcgctgggaacgggcgggatcaagccctgcgtgtcctccttcggcgccgaccagttcgacgagaacgacgagcgggagaagaagagcaagagctccttcttcaactggttctacttctccatcaacatcggcgcgctggtggcgtccacggtgctggtgtacgtgcagacgcacatcggctggggctggggcttcggcatccccgccgtggtcatggccatcgccgtcgtcagcttcttcgtgggcacgccgctgtacaggcaccagaagcccggtggcagcccgctgacgcgcatcgcgcaggtgctcgtcgcgtgcgcgcgcaagtggaacgtggccgtgcccgccgacaagtcgcgcctccacgagacgctggacaaggagtccggcatcgagggcagccgcaagctggagcacacggaccagctcgcgtgcctcgacagggctgccgtcgtgacggccgaggacagcgccgcgggggcggcgacggcgacgagcccgtggcgcctgtgcacggtgacgcaggtggaggagctcaagagcgtgatccggctgctccccatctgggcgagcgggatcgtgttcgcggcggtgtactcgcagatgagcaccatgttcatcctccagggcgacacgctggaccagcgcatggggtccaagttcaagatcccctcggcgacgctctccatggtggacaccatcagcgtcatcttctgggtgcccgtctacgaccgcgtcatcgtgcccgtcgtgcgctcctacaccggccgtccccgagggttcacgcagctgcagcggatgggcatcggcctcgtcgtctccatcttctccatggtggcggcgggcgtgctggacatcgtgcggctgaacgccgtggcgcggcacggcctgtacggcaaggacgaccacgtgcccatctccatcttctggcagataccgcagtacttcatcatcgggtgcgcggaggtgttcaccttcgtggggcagctggagttcttctacgaccaggcgcccgacgccatgaggagcatgtgctccgcgctgtcgctcaccaccgtcgcgctcggcaactacctcagcacggtgctggtgaccatcgtcacgcacatcaccaccaggaacggcaacatcgggtggatcccggagaacctcaaccggggccacctcgactacttcttctggctgctcgccgtgctcagcctcctcaacttcctcgtctacctcgtcatcgccacctggtacaagtacaagaagacggccgatgatatcccggacgccaaaggggagcactga

SEQ ID NO: 525 - protein, 581 aa, Sorghum bicolor
  REGION 97..504: note = Pfam Name: PTR2 Pfam Description: POT family
  REGION 1..581: note = Ceres Annot ID no. 8658700
  REGION 1..581: note = Bit score of 1207.1 for HMM based on sequences of Figure 11
  REGION 1..581: note = Functional Homolog Of SEQ ID NO. 426
MGEVADMYTQDGTVDRKGNPALKKDTGNWRACPYILANECCERLAYYGMSTNLVHYMKTRLGQVNSVASNNVTNWSGTCYITPLIGAFFADAYLGRFWTIASFMVIYIFGLALLTMASSVKGLVPTSCDNDGVCHPTDAQSAVVFVALYLIALGTGGIKPCVSSFGADQFDENDEREKKSKSSFFNWFYFSINIGALVASTVLVYVQTHIGWGWGFGIPAVVMAIAVVSFFVGTPLYRHQKPGGSPLTRIAQVLVACARKWNVAVPADKSRLHETLDKESGIEGSRKLEHTDQLACLDRAAVVTAEDSAAGAATATSPWRLCTVTQVEELKSVIRLLPIWASGIVFAAVYSQMSTMFILQGDTLDQRMGSKFKIPSATLSMVDTISVIFWVPVYDRVIVPVVRSYTGRPRGFTQLQRMGIGLVVSIFSMVAAGVLDIVRLNAVARHGLYGKDDHVPISIFWQIPQYFIIGCAEVFTFVGQLEFFYDQAPDAMRSMCSALSLTTVALGNYLSTVLVTIVTHITTRNGNIGWIPENLNRGHLDYFFWLLAVLSLLNFLVYLVIATWYKYKKTADDIPDAKGEH

SEQ ID NO: 526 - protein, 559 aa, Vitis vinifera
  REGION 96..488: note = Pfam Name: PTR2 Pfam Description: POT family
  REGION 1..559: note = Public GI ID no. 157346088
  REGION 1..559: note = Bit score of 1129.5 for HMM based on sequences of Figure 11
  REGION 1..559: note = Functional Homolog Of SEQ ID NO. 426
MAEEDIYTKDGTIDFRSNPAVKKETGTWKACPYILGNECCERLAYYGINTNLVNYLKFQLNQRNVVAINNVTNWSGTCYVTPLLGAFLADAYLGRYWTIAGFSIIYVFGMTLLTLSASAHGLKPLCDGQNVCYPTGLQTAVFFVGLYLIALGTGGIKPCVSSFGADQFDDSDETERKSKSSFFNWFYFSINIGALLASSVLVWVQTNVGWGWGFGIPAVAMGIAVMSFFSGTRLYRNQKPGGSPLTRICQVIVASLRKFQVEVPADKCLLYETADSESAVTGSRKLDHTKHLSFFDKAAVETHIDAIKGSVDSWRLCTVTQVEELKSIIRLLPIWATGIVFSAVYSQMGTLFVLQGNTMDLHITGSFQIPSASLSLFDTISVIFWVPIYDRLIVPFARKFTGHKSGFTQLQRIAIGLVISIFAMLVAGTLELLRLRMHIPMSIFWQVPQYFIIGCAEVFTFIGQLEFFYEQAPDAMRSLCSALSLTTAALGNYLSTLLVNVVTDVSTRGGKPGWIPDNLNYGHLHYFFWLLAALSVFNLGVYLQVARWYTYKRTAVDSL

SEQ ID NO: 527 - DNA, 2110 bp, Gossypium hirsutum
  misc_feature 1..2110: note = Ceres Clone ID no. 1926916
  misc_feature 1..2110: note = Encodes the peptide sequence at SEQ ID NO. 528
  source 1..2110: mol_type = unassigned DNA
aacattccactccttcagcttgtgttaatatctaatcaaccaaattttaaggatcccagaacttctttttctttttcctttttgttaaaagattccaaaagttgttgacattaccaatctaacaagttgcaaaacaatcatgggatctatggatgaagagagatcgcttttggaagctgaacttaatcaggctgaaagcagtgggctttacactggggatggctccgttgacttcaatgggaatcctattttgaagcagaatactggaaattggagagcgtgccctttcattttgggtaatgaatgctgtgagagattggcttattatgggatagcaactaatcttgtaagttacctgaccaagaaactgcatgaagggaatgtatcagctgcaagaaatgtaactacttggcaaggaacttgctaccttacacctctcattggagccgtcttagcagatgcatattggggaagatattggacaattgctgctttctccactatttacttcttcggaatgtgtacattgactctctcagcatcaattcctgcactgaaacctgctgaatgtgtgggttctatttgtccctcagctactccagctcagtatgctgtatttttctttgggctttatctgattgcattagggacgggtggaatcaaaccgtgtgtttcatcctttggggccgatcagtttgatgatactgatcccaatgaaagggtgaagaaggggtcctttttcaactggttctatttttccatcaacattggtgctctgatctcaagcagtcttctggtgtggattcaggacaatgctggatggggtcttggatttggcattccagcattgtttatgggccttgcaattggaagttttttctcaggcacggcactctatagatttcaaagaccaggaggaagccctattacaagaatgttccaggttttggttgcagcatttcataaacggagcctcaaggtacctgaagacagtactctcctatatgaaactggtgacaagcactctgccatagaaggaagtcggaaactagagcacagtgaggagttgaagtgcctagataaagctgccatagtcactgatgttgaaaccaaaagtggggacttctcaaatccttggaggctttgcactgtaacacaagtggaggaattgaaaatcttgatccgcatgtttcccatatgggctactggaattgtgttctctgctgtatatgctcaaatgtcaactatgtttgtggaacaagggatgatgatggacacaaaaattggttctttcactattcctcctgcttctctctcaacttttgatgttattagtgttattttttgggtccccatctatgataggatcattgtcccaattgcaagaaagttcacacgtaaggagcgaggcttctcagagttgcagcgtatgggaattggtctttttatttcagtcctatgcatgtcagccgcagctgtggtggagaccaggagattgcaccttgctaaagagctagatttggtcgataagcaggtcgctgtacccattagtattctttggcaaatacctcaatatttcttgttgggtgccgcagaggtctgcacatttatcggacagcttgagttcttctatgatcagtcccctgatgccatgcggagtttatgtagtgcgctttcacttctgactacatctttaggcaattacctgagttcttttattctaactcttgtaacttacttcacaacaaagggtggccagattggttggatatcggacaaccttaacgagggtcatctcgactatttcttctggctcttggctggtctcagcttcttaaacatgttggtgtataccctttgtgcttcgaggtacaagcagaagaaggcttcctaaagttccttctcatatggagagaaattaagctgaaatgttgttatagataaaaactgtatgcatctcaatacagggacatccttccactttggaaaccaactatcttgtatcttattgggttatattcattttctagctgattctcgcatattgtacattaatactgcatggttttcaattatttgccatccttaaatgtcggattaaattgtttgc

SEQ ID NO: 528 - protein, 584 aa, Gossypium hirsutum
  REGION 113..517: note = Pfam Name: PTR2 Pfam Description: POT family
  REGION 1..584: note = Ceres Clone ID no. 1926916
  REGION 1..584: note = Bit score of 1251.4 for HMM based on sequences of Figure 11
  REGION 1..584: note = Functional Homolog Of SEQ ID NO. 426
MGSMDEERSLLEAELNQAESSGLYTGDGSVDFNGNPILKQNTGNWRACPFILGNECCERLAYYGIATNLVSYLTKKLHEGNVSAARNVTTWQGTCYLTPLIGAVLADAYWGRYWTIAAFSTIYFFGMCTLTLSASIPALKPAECVGSICPSATPAQYAVFFFGLYLIALGTGGIKPCVSSFGADQFDDTDPNERVKKGSFFNWFYFSINIGALISSSLLVWIQDNAGWGLGFGIPALFMGLAIGSFFSGTALYRFQRPGGSPITRMFQVLVAAFHKRSLKVPEDSTLLYETGDKHSAIEGSRKLEHSEELKCLDKAAIVTDVETKSGDFSNPWRLCTVTQVEELKILIRMFPIWATGIVFSAVYAQMSTMFVEQGMMMDTKIGSFTIPPASLSTFDVISVIFWVPIYDRIIVPIARKFTRKERGFSELQRMGIGLFISVLCMSAAAVVETRRLHLAKELDLVDKQVAVPISILWQIPQYFLLGAAEVCTFIGQLEFFYDQSPDAMRSLCSALSLLTTSLGNYLSSFILTLVTYFTTKGGQIGWISDNLNEGHLDYFFWLLAGLSFLNMLVYTLCASRYKQKKAS

SEQ ID NO: 529 - protein, 585 aa, Arabidopsis thaliana
  REGION 113..517: note = Pfam Name: PTR2 Pfam Description: POT family
  REGION 1..585: note = Public GI ID no. 15226861
  REGION 1..585: note = Bit score of 1180.1 for HMM based on sequences of Figure 11
  REGION 1..585: note = Functional Homolog Of SEQ ID NO. 426
MGSIEEEARPLIEEGLILQEVKLYAEDGSVDFNGNPPLKEKTGNWKACPFILGNECCERLAYYGIAGNLITYLTTKLHQGNVSAATNVTTWQGTCYLTPLIGAVLADAYWGRYWTIACFSGIYFIGMSALTLSASVPALKPAECIGDFCPSATPAQYAMFFGGLYLIALGTGGIKPCVSSFGADQFDDTDSRERVRKASFFNWFYFSINIGALVSSSLLVWIQENRGWGLGFGIPTVFMGLAIASFFFGTPLYRFQKPGGSPITRISQVVVASFRKSSVKVPEDATLLYETQDKNSAIAGSRKIEHTDDCQYLDKAAVISEEESKSGDYSNSWRLCTVTQVEELKILIRMFPIWASGIIFSAVYAQMSTMFVQQGRAMNCKIGSFQLPPAALGTFDTASVIIWVPLYDRFIVPLARKFTGVDKGFTEIQRMGIGLFVSVLCMAAAAIVEIIRLHMANDLGLVESGAPVPISVLWQIPQYFILGAAEVFYFIGQLEFFYDQSPDAMRSLCSALALLTNALGNYLSSLILTLVTYFTTRNGQEGWISDNLNSGHLDYFFWLLAGLSLVNMAVYFFSAARYKQKKASS

SEQ ID NO: 530 - DNA, 2216 bp, Triticum aestivum
  misc_feature 1..2216: note = Ceres Clone ID no. 816960
  misc_feature 1..2216: note = Encodes the peptide sequence at SEQ ID NO. 531
  source 1..2216: mol_type = unassigned DNA
aaaatccaaaggtggctgtggctgtggctcacacacacacacacagagagagacaagagacagcgagtcacagaccgagggagggggagctcagaccaggccagcgggaatcgcgcgcgcgggccgggcgacgactgaggcggagatcccttccgaccggccgccgccgccgctcgtcgacaccgaccaacagaggaagcagttcctctgagttgctgcagcgcgtagtctgagagacaagcaagtacagcagccatgggggaggtcgcggcggagctgtacacccaggatggcaccatcgacatcaagggcaacccggccctcaagagcaacaccggcaactggcgagcatgcccctacatcctcgcgaacgagtgctgcgagcgccttgcctactacggcatgagcaccaacctggtcaacttcatgaaggaccggatgggcatggccaacgcggcggccgccaacaacgtcaccaactggggcggcacctgctacatcaccccgctcatcggcgccttcctcgccgacgcctacctcggccgcttctggaccatcgcctccttcatgatcatctacatcttcggcctcggcctgctcaccatggccacctccgtgcacggcctcgtgcccgcctgcgcctccaagggcgtgtgcgaccccacgccgggccagtcggcggccgtcttcatcgcgctctacctcatcgcgctcggcaccggcgggatcaagccctgcgtctcctccttcggggccgaccagttcgacgagcacgacgacgtggagcgcaagagcaagagctccttcttcaactggttctacttctccatcaacatcggcgcgctggtggcctcgtccgtgctggtgtacgtgcagacgcatgtggggtggagctggggcttcggcatccccgccgtcgtcatggccatcgccgtcggcagcttcttcgtcggcacgccgctgtaccgccaccagcgccccggcggcagcccgctcacccgcatcgcgcaggtgctcgtggccgccacgcgcaagctcggcgtccccgtcgacgggtcggcgctgtacgagaccgcggacagggagtccggcatcgaggggagccgcaagctggagcacacggggcagttcaggttcctcgacaaggcggcggtggagacgcaggcggacaagacggcggccaccgggccgtcgccgtggcggctgtgcacggtgacgcaggtggaggagctcaagagcgtggtgcggctgctgcccatctgggcgagcggcatcgtcttcgccacggtgtacggccagatgagcaccatgttcgtgctacagggcaacaccctggacgcctccatgggtcccaagttcaagatcccctccgcctccctctccatcttcgacaccctcagcgtcatcgcctgggtgcccgtctacgaccgcatcctcgtcccggcagtgcgctccgtcaccggccggccccgcggcttcacccagctccagcgcatgggcatcggcctcgtggtctccatgttcgccatgctcaccgccggcgtgctcgagctcgtccgcctccgcaccatcgcgcagcgcggcctctacggggagaaggacgtggtgcccatctccatcttctggcaggtgccgcagtacttcatcatcggcgccgccgaggtgttcaccttcgtgggccagctcgagttcttctacgaccaggcgcccgacgccatgaggagcatgtgctccgcgctctcgctcaccaccgtcgcgctcgggaactacctcagcacgctgctcgtcaccgtcgtggccaagctcaccaccaggggaggcaagcaggggtggatccccgacaacctcaacgtcggccacctcgactacttcttctggctgctcgccgcgctcagcctcctcaacttcgccgtctacctcctcatcgccagctggtacacctacaagaagaccgccggagatgacccggacgccaaagccaaaggaggagctgatgatgcacatgaccagtgagtgactctggctgcaacagttcgtgtctgaatgcgtgcgtgttttctttttcaagagacatgacagaatagattgttgaaagaagaagaagaagaaagcaaggatcgagacttcagagttcagataggtgaaattaagggaggacaatgaaatgcgtggtgtgatttgtgacttcaagattcaagagtgttgccttgttgatt

SEQ ID NO: 531 - protein, 585 aa, Triticum aestivum
  REGION 98..500: note = Pfam Name: PTR2 Pfam Description: POT family
  REGION 1..585: note = Ceres Clone ID no. 816960
  REGION 1..585: note = Bit score of 1243.0 for HMM based on sequences of Figure 11
  REGION 1..585: note = Functional Homolog Of SEQ ID NO. 426
MGEVAAELYTQDGTIDIKGNPALKSNTGNWRACPYILANECCERLAYYGMSTNLVNFMKDRMGMANAAAANNVTNWGGTCYITPLIGAFLADAYLGRFWTIASFMIIYIFGLGLLTMATSVHGLVPACASKGVCDPTPGQSAAVFIALYLIALGTGGIKPCVSSFGADQFDEHDDVERKSKSSFFNWFYFSINIGALVASSVLVYVQTHVGWSWGFGIPAVVMAIAVGSFFVGTPLYRHQRPGGSPLTRIAQVLVAATRKLGVPVDGSALYETADRESGIEGSRKLEHTGQFRFLDKAAVETQADKTAATGPSPWRLCTVTQVEELKSVVRLLPIWASGIVFATVYGQMSTMFVLQGNTLDASMGPKFKIPSASLSIFDTLSVIAWVPVYDRILVPAVRSVTGRPRGFTQLQRMGIGLVVSMFAMLTAGVLELVRLRTIAQRGLYGEKDVVPISIFWQVPQYFIIGAAEVFTFVGQLEFFYDQAPDAMRSMCSALSLTTVALGNYLSTLLVTVVAKLTTRGGKQGWIPDNLNVGHLDYFFWLLAALSLLNFAVYLLIASWYTYKKTAGDDPDAKAKGGADDAHDQ

SEQ ID NO: 532 - protein, 570 aa, Arabidopsis thaliana
  REGION 96..499: note = Pfam Name: PTR2 Pfam Description: POT family
  REGION 1..570: note = Public GI ID no. 15232435
  REGION 1..570: note = Bit score of 1171.6 for HMM based on sequences of Figure 11
  REGION 1..570: note = Functional Homolog Of SEQ ID NO. 426
MEEKDVYTQDGTVDIHKNPANKEKTGNWKACRFILGNECCERLAYYGMGTNLVNYLESRLNQGNATAANNVTNWSGTCYITPLIGAFIADAYLGRYWTIATFVFIYVSGMTLLTLSASVPGLKPGNCNADTCHPNSSQTAVFFVALYMIALGTGGIKPCVSSFGADQFDENDENEKIKKSSFFNWFYFSINVGALIAATVLVWIQMNVGWGWGFGVPTVAMVIAVCFFFFGSRFYRLQRPGGSPLTRIFQVIVAAFRKISVKVPEDKSLLFETADDESNIKGSRKLVHTDNLKFFDKAAVESQSDSIKDGEVNPWRLCSVTQVEELKSIITLLPVWATGIVFATVYSQMSTMFVLQGNTMDQHMGKNFEIPSASLSLFDTVSVLFWTPVYDQFIIPLARKFTRNERGFTQLQRMGIGLVVSIFAMITAGVLEVVRLDYVKTHNAYDQKQIHMSIFWQIPQYLLIGCAEVFTFIGQLEFFYDQAPDAMRSLCSALSLTTVALGNYLSTVLVTVVMKITKKNGKPGWIPDNLNRGHLDYFFYLLATLSFLNFLVYLWISKRYKYKKAVGRAH

SEQ ID NO: 533 - DNA, 1758 bp, Sorghum bicolor
  misc_feature 1..1758: note = Ceres Annot ID no. 8643789
  misc_feature 1..1758: note = Encodes the peptide sequence at SEQ ID NO. 534
  source 1..1758: mol_type = unassigned DNA
atggcggccatggccagtggaggagatgagacgacgacgacgacgcttgacgggacgacggatcactccggcaagccggcggtgcggagcaagacggggacgtggcgcgcgtgccctttcatcctgggcaacgagtgctgcgagcgcctggcctactacggcatgagctccaacctcgtcaactacatgatcgaccgcctccaccaggggaacgccgccgccgccaacaacgtcagcaactggtccggcacctgctacgtcatgcccctcctcggcgccttcctggccgacgcctacctcggcaggtaccgcaccatcgccgccttcatggcgctctacatcctcggcctcacgctgctcaccatgagcgccgccgtcccgggcctcaggccgccgcccgacggagcaggcgccgtgaccgcgggccagagcgccgccttcttcgtggcgctctacctcatcgcggtgggcacgggaggcatcaagccctgcgtctcatccttcggcgccgaccagttcgacgacgccgacccgcgcgagcgccagagcaagagctccttcttcaactggttctacatgtccatcaacgtcggcgcactcctcgcctcctccgtgctcgtctgggtccagatgaacgtcggctggggatggggctttggcatccccgccgccgccatggccgtcgccgtcgccagcttcctgatggggagcaagctgtacaggcaccagaagccggggggcagcccgctcacgcggatgctgcaggtggtggtcgccgcctggaggaagggaaagcagcccgtgcccgcggacgcgtccctgctccacgaggcgtcctccgcctccgcgtccgccatccagggcagcaggaagctggagcacacggagcagttccggtggctggacagggcggcggtggtgacctccaccgatgaggacggcaagaacaaccccgacccctggcggctgtgcacggtgacgcaggtggaggagctcaagagtgtcatccgtcttctgccggtgtgggcgagcggcatcgtcatgtcggcggtgtacagccagatgagcaccatgttcgtgctgcagggcaacacgctggacccgcgcatgggctccggcgccggcgccttcaagatcccctccgcctcgctctccatcttcgacaccctcagcgtcatcgcctgggcgcccgcctacgaccgactcgtcgtccccgccgcgcgccgctggacggggcacccgcgcggcttcacgcagctccagcgcatgggcatcggcctcgccgtctccgtcctgtccatgctcgccgcgggggcgctggaggtggccaggctccgcgtcgccgcctcgcacggcatgctcgacgactccaccaactacctgcccatctccatcttctggcaggtgccgcagtacttcatcatcggagccgcagaggtgttcaccttcatcggccagatcgagttcttctacgaccaggcgccggacgccatgaggagcatgggcaccgcgctctcgctcacctcgtccgcgctcggcagctacctcagcgcgctgctggtgtccgtcgtcaccgccatcaccacgaggaacggcggcctcggctggatccccgacaacctcaaccggggccacctcgactacttcttctggctgctctccgtgctcagcgtcatcaacttcgtcgtctacctctggattgcaaagtggtacaggtacaagcaggcaaccacaagttatgaactcagcagtgtatag

SEQ ID NO: 534 - protein, 585 aa, Sorghum bicolor
  REGION 103..510: note = Pfam Name: PTR2 Pfam Description: POT family
  REGION 1..585: note = Ceres Annot ID no. 8643789
  REGION 1..585: note = Bit score of 1111.7 for HMM based on sequences of Figure 11
  REGION 1..585: note = Functional Homolog Of SEQ ID NO. 426
MAAMASGGDETTTTTLDGTTDHSGKPAVRSKTGTWRACPFILGNECCERLAYYGMSSNLVNYMIDRLHQGNAAAANNVSNWSGTCYVMPLLGAFLADAYLGRYRTIAAFMALYILGLTLLTMSAAVPGLRPPPDGAGAVTAGQSAAFFVALYLIAVGTGGIKPCVSSFGADQFDDADPRERQSKSSFFNWFYMSINVGALLASSVLVWVQMNVGWGWGFGIPAAAMAVAVASFLMGSKLYRHQKPGGSPLTRMLQVVVAAWRKGKQPVPADASLLHEASSASASAIQGSRKLEHTEQFRWLDRAAVVTSTDEDGKNNPDPWRLCTVTQVEELKSVIRLLPVWASGIVMSAVYSQMSTMFVLQGNTLDPRMGSGAGAFKIPSASLSIFDTLSVIAWAPAYDRLVVPAARRWTGHPRGFTQLQRMGIGLAVSVLSMLAAGALEVARLRVAASHGMLDDSTNYLPISIFWQVPQYFIIGAAEVFTFIGQIEFFYDQAPDAMRSMGTALSLTSSALGSYLSALLVSVVTAITTRNGGLGWIPDNLNRGHLDYFFWLLSVLSVINFVVYLWIAKWYRYKQATTSYELSSV

SEQ ID NO: 535 - DNA, 1743 bp, Sorghum bicolor
  misc_feature 1..1743: note = Ceres Annot ID no. 8631367
  misc_feature 1..1743: note = Encodes the peptide sequence at SEQ ID NO. 536
  source 1..1743: mol_type = unassigned DNA
atggatcctaccactattgattcgaaatggacgtctcccatcactgaagatgggtccatggacagacgaggaaacccagctgtcaagacaaccaccggaggatggagatctgccatcctgctgttagctaactatggactcgcgacgtgcgccttcttcggcgtcggcgtgaacctcgtggtgttcctgcgccgggtgctccaccagggcaacgccgaggcggccaacaacatcagcaagtggacagggaccgtctacatcttctccctcatcggcgccttcctcagcgactcctactggggccgttacgtcacctgcgccatctttcagatcatctatgtgacgggcctggtgatcctgtcgcttgcgtcatggttcttgttggtgaagccctccggctgcggcggcgtcaaggtgcactgcgacgagccgtcggcgcccggcgtcgcgctgttctacctgtccacctacatgatcgcgttcggcaacggagggtaccagccttccatcgcgaccttcggatcggaccagttcgacgagacggaccccaaggaggggcgctccaaggtcgccttcttcagctacttctacctggcgctcaacgtggggtccctgttttccaacacggtgctggtgtactacgaggactcagggcggtgggtcatggggttctgggtctcggcggccgccgccgcgctggcgctcgtgctcttcttgctcggcacgcccaactaccggcacttcaagccgagcggcaacccgctgacccgcgtcgcgcaggtgttcgtcgccgcgttccgcaagtggcacgctgaggttccccgcggcgagctcctccacgaggtggaaggagaggaccctaagatctcgggcatccgcaagatccttcacagcgacgagctcaggttcctcgacaaagcggcgacgatcaccgagggggagaagatggagaacccgtggaggctctgcacggtgacgcaggtggaggaggtgaagtgcatcctgaagatgctgcccatctggctgtgcacgatcgtgtactcggtggtgttcacccagatggcgtcgctgttcgtggagcagggcgccaccatggacaccaacatcgggtcgttccacttccccgcagcgagcatgtcgctgttcgacgtcctcagcgtgctggcgttcatcgccatctaccggcgggtcctggtgcccgtcatggcgcggctgtcgggcaacccgcagggcctgacggagctgcagcgcatgggcgtcgggctcgtgatcggcatggcggcgatggtggtggcgggcgtggtggaggtggagcggctgaagcgcgtggcagccccggaccagccgagctccctgagcgtgctgtggcaggtgccgcagtacgcgctgatcggggcgtcggaggtgttcatgtacgtggggcagctggagttcttcaacgggcaggcgcccgacggcgtcaagagcttcggcagcgcgctgtgcatggcgtccatctcgctggggaactacgtgagcatcatgctggtgagcgtggtcacaagcctcaccgccggggagaagcgtccggggtggatccctgggaacctcaactccggccacctggacaggttctacttcctcctcgcagcgctctcgctcgtcgacctcgccgtctacatcgcctgtgccatgtggtacaagggcatcaagcttgacggcggcgacggcgatgacagtagaaaggtctctgcgcatgtctag

SEQ ID NO: 536 - protein, 580 aa, Sorghum bicolor
  REGION 103..499: note = Pfam Name: PTR2 Pfam Description: POT family
  REGION 1..580: note = Ceres Annot ID no. 8631367
  REGION 1..580: note = Bit score of 1335.6 for HMM based on sequences of Figure 11
  REGION 1..580: note = Functional Homolog Of SEQ ID NO. 426
MDPTTIDSKWTSPITEDGSMDRRGNPAVKTTTGGWRSAILLLANYGLATCAFFGVGVNLVVFLRRVLHQGNAEAANNISKWTGTVYIFSLIGAFLSDSYWGRYVTCAIFQIIYVTGLVILSLASWFLLVKPSGCGGVKVHCDEPSAPGVALFYLSTYMIAFGNGGYQPSIATFGSDQFDETDPKEGRSKVAFFSYFYLALNVGSLFSNTVLVYYEDSGRWVMGFWVSAAAAALALVLFLLGTPNYRHFKPSGNPLTRVAQVFVAAFRKWHAEVPRGELLHEVEGEDPKISGIRKILHSDELRFLDKAATITEGEKMENPWRLCTVTQVEEVKCILKMLPIWLCTIVYSVVFTQMASLFVEQGATMDTNIGSFHFPAASMSLFDVLSVLAFIAIYRRVLVPVMARLSGNPQGLTELQRMGVGLVIGMAAMVVAGVVEVERLKRVAAPDQPSSLSVLWQVPQYALIGASEVFMYVGQLEFFNGQAPDGVKSFGSALCMASISLGNYVSIMLVSVVTSLTAGEKRPGWIPGNLNSGHLDRFYFLLAALSLVDLAVYIACAMWYKGIKLDGGDGDDSRKVSAHV

SEQ ID NO: 537 - protein, 612 aa, Vitis vinifera
  REGION 141..545: note = Pfam Name: PTR2 Pfam Description: POT family
  REGION 1..612: note = Public GI ID no. 157339093
  REGION 1..612: note = Bit score of 1272.6 for HMM based on sequences of Figure 11
  REGION 1..612: note = Functional Homolog Of SEQ ID NO. 426
MLLFSVRIYVHFLSVREKNHEDLFSKQLGSLHYVSCVGWFILYLQNENSDLHTGDGSVDIHGKPVLRSNTGNWRACPFILGTECCERLAYYGIATNLVTYLTSKLHEGNVSAARNVTTWQGTCYLTPLIGAVLADAYCGRYWTIAAFSTIYFIGMCTLTLSATVPAFKPADCVGSVCPPATTAQYAVFFFGLYLIALGTGGIKPCVSSFGADQFDDTDPKERVKKGSFFNWFYFSINIGALVSSSFLVWIQDNAGWGLGFGIPALFMGIAIASFFSGTPLYRFQKPGGSPITRMCQVLVASFRKWKLEVPKDSNLLYETPDKNSAIEGSRKLEHSNELKCLDKAAVISDAEIKSGDFSNPWNLCTVTQVEELKILIRMFPIWATGIVFSAVYAQMSTMFVEQGMVMDTNIGSFTIPPASLSTFDVISVIFWVPVYDRILVPIARKFTGKERGFSELQRMGIGLFLSVLCMSAAALVEIKRLQLATALDLVDEDVAVPLSILWQIPQYFLLGAAEVFTFIGQLEFFYDQSPDAMRSLCSALSLLTTSLGNYLSAFILTVVTTLTTEDGKTGWIPDNLNKGHLDYYFWLLAGLSFLNLLVYMICAKIYKRKKGS

SEQ ID NO: 538 - DNA, 1767 bp, Sorghum bicolor
  misc_feature 1..1767: note = Ceres Annot ID no. 8633031
  misc_feature 1..1767: note = Encodes the peptide sequence at SEQ ID NO. 539
  source 1..1767: mol_type = unassigned DNA
atggccggcgccgagcgcgtggaggctccctccttggaggagcaagggctcctcgctctagaggaatccaaccaactagtatacactggagatggatcagttgacttttctggaaatcctgttatcaaggaaagaactggtagatggaaggcatgtccattcatattaggtaatgaatgctgtgaacgactggcctattatggcatcgccacgaaccttgttacttacttgacaaaaaagctacatgttggcaatgcctctgctgctagcaacgtgactacatggcagggaacttgctacttgactccgcttattggagcagtcctggctgatgcatactgggggaagtattggataattgcaacatcctccatagtgtacttcatcgggatggtaatactgactctttcagcatcagttcctatgctcatgcctccatcctgtgaaggatccttttgcgcaccagcaagcccttttcagtatactgtcttttttcttggtctttatctgattgcactgggtgctggtggaattaagccatgcgtctcgtcctttggagctgatcaatttgatgatacagatcctgatgagcgaatccagaagggttctttctttaattggttctatctttcaataaatattggtggcctcatatcaagcagctttctggtttgggtgcaagacaatgttggatggggactgggctttggcattccgacagtatccatggggctggcaatcataagcttcttctctggcacatcactttataggttccaaaaacctggaggtagtcctattacacgagtatgccaggtgattgttgcctcgttgcgcaagtggaatgtgcatgtcccagaggacagctctctcttgtatgagcaacctgatggggtatcaacaattgaggggagtcggcaattagagcacacagatgaactcagattttttgacaaggctgctacagttgccaaagttgacgtgaaaactgctgacttcaacaatccatggcggatatgcacagtcacgcaggtggaagaactaaagatactggtaaggatgttccctatatgggcaacaacaatcgtgttttctgttgcatatgctcagatgtcaacaatgtttgtggaacaaggcatggtgcttgacccatccttgggttcattcaagtttcctccagcgtcgttatctacttttgacaccctaaccatcatcatatgtgtcccgatgtacaattacatcatggttccaatagctaggagattcactggcaacgggaggggctttacagagttgcagaggatgggcattggcctggtaatttccatcatagctatgtcagtcgctgcaatccttgaaatcaagcggctagaagttgccagggaagcacacctggtagatcagaacatcccagtcccattgagcatattctggcaaatccctcagtatttcctgatcggtctagcggaggtgttcacattcatcggagcgctcgagttcttttataatcagtcaccggatgccatgaggagcgtctgcagcgcacttaatcttctcaccgtttcctttgggaactatctcaacacgttcattttgacaatggttgcatactttactacaaggggaggtaaccctggatggattcctgacaacttgaacgaagggcatcttgattacttcttctggctcattgctggcctcagttttctgaacctgattgtatatgtcatctgtgctagcaaatacaagagcaagaaggcagcttga

SEQ ID NO: 539 - protein, 588 aa, Sorghum bicolor
  REGION 117..521: note = Pfam Name: PTR2 Pfam Description: POT family
  REGION 1..588: note = Ceres Annot ID no. 8633031
  REGION 1..588: note = Bit score of 1182.5 for HMM based on sequences of Figure 11
  REGION 1..588: note = Functional Homolog Of SEQ ID NO. 426
MAGAERVEAPSLEEQGLLALEESNQLVYTGDGSVDFSGNPVIKERTGRWKACPFILGNECCERLAYYGIATNLVTYLTKKLHVGNASAASNVTTWQGTCYLTPLIGAVLADAYWGKYWIIATSSIVYFIGMVILTLSASVPMLMPPSCEGSFCAPASPFQYTVFFLGLYLIALGAGGIKPCVSSFGADQFDDTDPDERIQKGSFFNWFYLSINIGGLISSSFLVWVQDNVGWGLGFGIPTVSMGLAIISFFSGTSLYRFQKPGGSPITRVCQVIVASLRKWNVHVPEDSSLLYEQPDGVSTIEGSRQLEHTDELRFFDKAATVAKVDVKTADFNNPWRICTVTQVEELKILVRMFPIWATTIVFSVAYAQMSTMFVEQGMVLDPSLGSFKFPPASLSTFDTLTIIICVPMYNYIMVPIARRFTGNGRGFTELQRMGIGLVISIIAMSVAAILEIKRLEVAREAHLVDQNIPVPLSIFWQIPQYFLIGLAEVFTFIGALEFFYNQSPDAMRSVCSALNLLTVSFGNYLNTFILTMVAYFTTRGGNPGWIPDNLNEGHLDYFFWLIAGLSFLNLIVYVICASKYKSKKAA

SEQ ID NO: 540 - protein, 591 aa, Oryza sativa
  REGION 121..525: note = Pfam Name: PTR2 Pfam Description: POT family
  REGION 1..591: note = Public GI ID no. 125543029
  REGION 1..591: note = Bit score of 1142.8 for HMM based on sequences of Figure 11
  REGION 1..591: note = Functional Homolog Of SEQ ID NO. 426
  source 1..591: note = Oryza sativa subsp. indica
MEEAAEDRRLQVREEGGDQEPLLLLPQDANLYTGDGSVDIKGRPALKHATGNWRACFFILGDECCERLAYYGIAKNLVTYLKTNLHQGNLEAARNVTTWQGTCYLTPLIGALLADSYWGKYWTIAAFSAIYFIGLVALTLSASVPALQPPKCSGSICPEASLLQYGVFFSGLYMIALGTGGIKPCVSSFGADQFDDSDPADRVKKGSFFNWFYFCINIGAFVSGTVIVWIQDNSGWGIGFAIPTIFMALAIASFFVASNMYRFQKPGGSPLTRVCQVVVAAFRKWHTEVPHDTSLLYEVDGQTSAIEGSRKLEHTSELEFFDKAAIISSDDAKSDSFTNPWRLCTVTQVEELKILIRMFPIWATTIIFNAVYAQNSSMFIEQGMVLDKRVGSFIVPPASLSTFDVISVIIWIPFYDRVLVPIARKFTGREKGFSELQRIGIGLALSILAMLSAALVELRRLEIARSEGLIHEDVAVPMSILWQIPQYFLVGAAEVFAAIGQVEFFYNEAPDAMRSLCSAFALVTVSLGSYLSSIILTLVSYFTTQGGDPGWIPDNLNEGHLDRFFSLIAGINFVNLLVFTGCAMRYRYKKA

SEQ ID NO: 541 - protein, 593 aa, Oryza sativa
  REGION 122..526: note = Pfam Name: PTR2 Pfam Description: POT family
  REGION 1..593: note = Public GI ID no. 115454995
  REGION 1..593: note = Bit score of 1234.1 for HMM based on sequences of Figure 11
  REGION 1..593: note = Functional Homolog Of SEQ ID NO. 426
  source 1..593: note = Oryza sativa subsp. japonica
MAEVTVVRAEREEESTLEQGLLAIPEESNQLTYTGDGSVDFSGNPVVKERTGRWRACPFILGNECCERLAYYGISTNLVTYLTKKLHDGNASAASNVTAWQGTCYLTPLIGAILADAYWGRYWTIATFSTIYFIGMAVLTLSASVPTFMPPPCEGSFCPPANPLQYTVFFLGLYLIALGTGGIKPCVSSFGADQFDDTDPVERIQKGSFFNWFYFSINIGALISSSFLVWVQDNIGWGIGFGIPTIFMGLAIISFFSGTSLYRFQKPGGSPITRVCQVVVASFRKWNVHVPEDSSRLYELPDGASAIEGSRQLEHTDELRCLDKAATITDLDVKADSFTNPWRICTVTQVEELKILVRMFPVWATTIVFSAVYAQMSTMFVEQGMMLDTSVGPFKIPPASLSTFDVVSVIIWVPLYDSILVPIARRFTGNPRGFTELQRMGIGLVISIFSMAAAAVLEIKRLDIARAEHLVDQNVPVPLNICWQIPQYFLVGASEVFTFVGSLEFFYDQSPDAMRSLCSALQLVTTALGNYLSAFILTLVAYFTTRGGNPGWIPDNLNQGHLDYFFWLLAGLSFLNFVIYVICANKYKSKKAA

SEQ ID NO: 542 - DNA, 1758 bp, Medicago truncatula
  misc_feature 1..1758: note = Ceres Annot ID no. 8755090
  misc_feature 1..1758: note = Encodes the peptide sequence at SEQ ID NO. 543
  source 1..1758: mol_type = unassigned DNA
atggaaccagcaggaccccccaacaatgtcaatcctgacaatattgaagtagttgaggcgacagaaggaaatcatgtcaatggagaagtggcagatggaaagagtaaaggaggatggacaactgcatacatcttgctagctaatcaagcactggcaacactagcattctttggagttggagtgaacttggttctgttcctaacgagagtccttcgtcaagacagtgccgaggctgctaataatgtcagcttgtggactggaactgtttacatattttcactcttgggagcattccttagtgattcttattggggaagatacttaacatgcgctatctttcagctcttctttgttctgggtttggggctgatgtctttgacatcatggctgtttttgatcaaaccattaggttgcggtaatgaacatagcgtttgcaatgaaccaacaccattgggaataggcctattctatttgtcaatatatttggttgcatttggatatggagggcatcaacctaccttagcaacatttggagctgatcaatttgatgataagagtattcaacaaaccaactccagagaggctttctttagttacttttactttgcactcaatgttggatcactattttccaacaccattttggtttattacgaagataccggtatgtggacattgggtttcggtgtctccttagcctctgctattatagccttgatttcattcttagcaggatctcgaaaatatcgatatgttaaggcgtatggcaatcctgtcataagagtaatccaggtctttgttgctgccactaggaagtggaatgttgaacccgccaaggaggaccaactttacgaggttgacggcaatgtatccgccatcaaaggaagcagaaagattcttcactcccaagatataagattcatggacaaggcggcaacacggacagtaaaagacgggaatgaatccgggaaccaatggcgactttgcactgtaactcaagttgaggaagccaaatgtgtgttgagaatgataccagtttggctgtgcactattatttactctgttgtattcacacaaatggcttctctttttgtcgaacaaggtgatgtaatgaacaacaaggtaggaaaatttcacttgccagcagcaaccatgtctgtgtttgatatatgcagtgtccttgtatgcactggactttatcgccaagttctagttcccttggccggaaaattaagcggtaatcctaaggggttaagcgaacttcaaagaatgggagttggcctagttattggaatgcttgcgatggttgcagctggtgtaacggagtttgaaaggcttaaacaagttcagcctggacagaaacaaagtaatttgagtatattctgtcaaattccacagtatgttcttgttggtgcttcagaagtttttatgtatgtgggtcagttggagttcttcaatggtcaagcacctgatggcataaaaagctttggaagttcactttgtatggcatcaatttctcttggaaactatgttagcagcatgatggtgaaattggtgatgatattcactgctagaggcgaggaacctggatggattccgaataacttaaatgttgggcacatggacaggtttttctacctcattgcagcgctaagtgcccttgaccttgtcatctatgtgttctgtgctcggtggtacaagggtgtcacgaacattgaaggtagtgacaatgtcggaagccaagaggacaatgtttga

SEQ ID NO: 543 - protein, 585 aa, Medicago truncatula
  REGION 107..505: note = Pfam Name: PTR2 Pfam Description: POT family
  REGION 1..585: note = Ceres Annot ID no. 8755090
  REGION 1..585: note = Bit score of 1170.2 for HMM based on sequences of Figure 11
  REGION 1..585: note = Functional Homolog Of SEQ ID NO. 426
MEPAGPPNNVNPDNIEVVEATEGNHVNGEVADGKSKGGWTTAYILLANQALATLAFFGVGVNLVLFLTRVLRQDSAEAANNVSLWTGTVYIFSLLGAFLSDSYWGRYLTCAIFQLFFVLGLGLMSLTSWLFLIKPLGCGNEHSVCNEPTPLGIGLFYLSIYLVAFGYGGHQPTLATFGADQFDDKSIQQTNSREAFFSYFYFALNVGSLFSNTILVYYEDTGMWTLGFGVSLASAIIALISFLAGSRKYRYVKAYGNPVIRVIQVFVAATRKWNVEPAKEDQLYEVDGNVSAIKGSRKILHSQDIRFMDKAATRTVKDGNESGNQWRLCTVTQVEEAKCVLRMIPVWLCTIIYSVVFTQMASLFVEQGDVMNNKVGKFHLPAATMSVFDICSVLVCTGLYRQVLVPLAGKLSGNPKGLSELQRMGVGLVIGMLAMVAAGVTEFERLKQVQPGQKQSNLSIFCQIPQYVLVGASEVFMYVGQLEFFNGQAPDGIKSFGSSLCMASISLGNYVSSMMVKLVMIFTARGEEPGWIPNNLNVGHMDRFFYLIAALSALDLVIYVFCARWYKGVTNIEGSDNVGSQEDNV

SEQ ID NO: 544 - DNA, 1794 bp, Glycine max
  misc_feature 1..1794: note = Ceres Annot ID no. 8755097
  misc_feature 1..1794: note = Encodes the peptide sequence at SEQ ID NO. 545
  source 1..1794: mol_type = unassigned DNA
atggcctgcttagaagtcagcaaagaggtaaagttcaaaggtgacacggaagaactcactcttgatggaagtgttgattggcatggtcgccctgcaattagagccaaatctggcagatgggttgctggaaccatcgttctattgaaccaaggtctggcaaccttagcattctttggagtaggggtgaacctagtgctgttcctgacaagagtgatggggcaagataatgctgaagctgcaaacaatgtgagcaagtggactggcacagtttacatcttctctcttgtgggtgctttcctaagtgattcgtattggggaagatacaaaacttgtgccatctttcaggtcatctttgtaataggtctagtatccttgtctctttcatcatacctctccttgattaggcctaaaggttgtgggaatgaaacaattccatgtgggaaacattcaagcttggagatggggatgttctacctctcaatctatcttattgctttagggaatggagggtatcaaccaaatattgccacatttggagctgatcagtttgacgaggagcactcaaaggagggttactcaaaggttgccttctttagctacttctatctggctttgaaccttggttcactcttctcaaacacaattctaggctattttgaagatgaaggactgtgggctctagggttctgggtgtctgcaggctctgcttttgctgcccttgtcttatttcttcttgggaccccaagatatagacacttcaaacctagtggcaatcctctttcaaggttcagccaagtccttgttgctgcatcaaggaaatggagagctcaaatggcatcaaatggagaggatctatatgtcatggatgaaaatgaatctcccaccaatggcaacaggaagattctccacaccgaagggttcaagtttctggatagagcagcgattatatcttccagagatctagaagaccaaaagagtggcgtttataacccctggcgtctctgccctataactcaagttgaagaagtgaagtgcatactaagacttcttcctatttggctttgcacgataatatactcagtggttttcacacaaatggcttctctttttgtggagcaaggggctgccatgaaaactacaatttcccatttcagaataccacctgcaagcatgtctagctttgacatcctcagcgtagctgtcttcattttcttctaccgtcgagtgattgatccacttgtcggaagacttaaaaagaaaagttccaagggacttactgagcttcagagaatgggaatagggcttgttatagctgtaatggcaatggtttcagctggaatagttgaatgctacagacttaagtatgcagacccagtatgcccccactgcagtggcacaagctctttaaccatcttttggcaaattcctcagtacacacttattggagcttcagaggttttcatgtatgtaggccagttagagttcttcaatgctcagacgccagatggcttaaagagcttcggaagtgccctttgcatgacgtccatatctcttgggaactacgtaagtagcttacttgttagtatagttatgaagatctccactgaggatcacatgccagggtggatccctggaaacttaaacagaggtcacctagataggttttacttcctcttagctatcttgacatctatagatttggtcctttatattgcatgtgcaaagtggttcaagagtatacagctggaagggaaatatgaagagaatgatatgcctggtagctttaaagtctaa

SEQ ID NO: 545 - protein, 597 aa, Glycine max
  REGION 108..516: note = Pfam Name: PTR2 Pfam Description: POT family
  REGION 1..597: note = Ceres Annot ID no. 8755097
  REGION 1..597: note = Bit score of 1281.3 for HMM based on sequences of Figure 11
  REGION 1..597: note = Functional Homolog Of SEQ ID NO. 426
MACLEVSKEVKFKGDTEELTLDGSVDWHGRPAIRAKSGRWVAGTIVLLNQGLATLAFFGVGVNLVLFLTRVMGQDNAEAANNVSKWTGTVYIFSLVGAFLSDSYWGRYKTCAIFQVIFVIGLVSLSLSSYLSLIRPKGCGNETIPCGKHSSLEMGMFYLSIYLIALGNGGYQPNIATFGADQFDEEHSKEGYSKVAFFSYFYLALNLGSLFSNTILGYFEDEGLWALGFWVSAGSAFAALVLFLLGTPRYRHFKPSGNPLSRFSQVLVAASRKWRAQMASNGEDLYVMDENESPTNGNRKILHTEGFKFLDRAAIISSRDLEDQKSGVYNPWRLCPITQVEEVKCILRLLPIWLCTIIYSVVFTQMASLFVEQGAAMKTTISHFRIPPASMSSFDILSVAVFIFFYRRVIDPLVGRLKKKSSKGLTELQRMGIGLVIAVMAMVSAGIVECYRLKYADPVCPHCSGTSSLTIFWQIPQYTLIGASEVFMYVGQLEFFNAQTPDGLKSFGSALCMTSISLGNYVSSLLVSIVMKISTEDHMPGWIPGNLNRGHLDRFYFLLAILTSIDLVLYIACAKWFKSIQLEGKYEENDMPGSFKV

SEQ ID NO: 546 - DNA, 1797 bp, Glycine max
  misc_feature 1..1797: note = Ceres Annot ID no. 8755098
  misc_feature 1..1797: note = Encodes the peptide sequence at SEQ ID NO. 547
  source 1..1797: mol_type = unassigned DNA
atgtcttgcttagagtctcatgtctacaaagaggtaattagaaagtttgaagaagagtcagaagaagtcactcttgatgggagtgttgatttccatggacgtcctgcaatcagagccaaatctggcagatgggtggctgcaattatcatactcttgaaccaagctctggcaacccttgcattctttgggatcggcgtgaacctagtgttgtttctgacaagggtggtaggacaaaacaatgctgatgcagccaacaatgtgagcaagtggaccggaactgtttacatcttctctcttgtgggtgctttcctcagtgattcttattggggaagatataaaacatgtgctgtctttcaggtcatctttgttataggtctaatgtccttatccctgtcatcatacctattcttgcttaagcctaaaggttgtgggaatgaaacagttagttgtgggaaacattcaaaattggagatggggatgttctacctctcaatctatcttgttgccttggggaatggaggttatcaaccaaatattgccacatttggggctgatcagtttgatgaggagcactcaaaggagggtcacaacaaggtggccttctttagctacttctacctagcttttaacattggccaactcttctcaaacaccattcttgtctattttgaggacgaaggaatgtgggctcttggtttctggctgtctgcaggatctgcctttgctgcattggtcttgtttcttatatgcaccccaaggtatagacacttcaagcccagtggcaaccctatctccaggttcagccaagtcctagtggctgcatcaaggaaatccaaacttcaaatgtcatcaaacggagaggacttattcaacatggatgcaaaggaggcatccaacgatgccaacagaaagattctccacactcacgggttcaagttcttggatagggcagcgttcatatcttcaagagatctaggggaccagaaagggctcggttacaacccatggcgtctctgtcctgtaagtcaagttgaagaagtgaagtgcatactgagacttcttccaatctggctctgcaccataatatactcagtagttttcacacaaatggcttcactttttgtggagcaaggtgctgccatgaaaaccaaggtttccaacttcagaataccaccagctagcatgtccagctttgatatcctcagtgtggctgttttcattttcttttaccgtcgagttcttgatccatttgtgggaaaacttaaaaagacagattctaagggacttacagagcttcagagaatgggagttggacttgttatagctgtactggcaatggtttcggctggattagttgaatgctataggctcaagtatgcaaaacaaggatgcctacactgcaatgactcgagcactttaagcatcttctggcaaatccctcagtatgcatttataggagcttctgaggtttttatgtacgtaggtcagttggagttcttcaacgctcagacaccagacggcttaaagagctttggaagtgctctttgcatgacatccatttcccttgggaactatgtgagtagtttacttgttagtgtggttatgaagatatccaccgaagatcacatgccggggtggatccctggacacctcaacaaaggccacttagataggttttacttcctcttagctgccttgacatcgatagacttgatcgcttatattgcatgtgcaaaatggtacaagtctatacagctagaggccaaaactggagagattgatgagacacaagtataa

SEQ ID NO: 547 - protein, 598 aa, Glycine max
  REGION 112..520: note = Pfam Name: PTR2 Pfam Description: POT family
  REGION 1..598: note = Ceres Annot ID no. 8755098
  REGION 1..598: note = Bit score of 1255.3 for HMM based on sequences of Figure 11
  REGION 1..598: note = Functional Homolog Of SEQ ID NO. 426
MSCLESHVYKEVIRKFEEESEEVTLDGSVDFHGRPAIRAKSGRWVAAIIILLNQALATLAFFGIGVNLVLFLTRVVGQNNADAANNVSKWTGTVYIFSLVGAFLSDSYWGRYKTCAVFQVIFVIGLMSLSLSSYLFLLKPKGCGNETVSCGKHSKLEMGMFYLSIYLVALGNGGYQPNIATFGADQFDEEHSKEGHNKVAFFSYFYLAFNIGQLFSNTILVYFEDEGMWALGFWLSAGSAFAALVLFLICTPRYRHFKPSGNPISRFSQVLVAASRKSKLQMSSNGEDLFNMDAKEASNDANRKILHTHGFKFLDRAAFISSRDLGDQKGLGYNPWRLCPVSQVEEVKCILRLLPIWLCTIIYSVVFTQMASLFVEQGAAMKTKVSNFRIPPASMSSFDILSVAVFIFFYRRVLDPFVGKLKKTDSKGLTELQRMGVGLVIAVLAMVSAGLVECYRLKYAKQGCLHCNDSSTLSIFWQIPQYAFIGASEVFMYVGQLEFFNAQTPDGLKSFGSALCMTSISLGNYVSSLLVSVVMKISTEDHMPGWIPGHLNKGHLDRFYFLLAALTSIDLIAYIACAKWYKSIQLEAKTGEIDETQV

SEQ ID NO: 548 - DNA, 1761 bp, Glycine max
  misc_feature 1..1761: note = Ceres Annot ID no. 8755099
  misc_feature 1..1761: note = Encodes the peptide sequence at SEQ ID NO. 549
  source 1..1761: mol_type = unassigned DNA
atggaagaaaaggtaaataaggagcaccaggtttgcacatcggatggagctattgatagccagggtcatcctgcagttcgagagaaaacgggtgactgggttgctgcaattttgattttagtgaatcaagggcttgctactttggcattctttggaattggagtgaatttggtgttgtttttgacgagagtgatgggtcaagacaatgctgaagcagccaacagtgtgagcaagtggacagggacagtttacctcttctctcttcttggagccttccttagtgactcttactggggaaggtacatgacctgtgccatcttccaggtcatatttgttattggtttggtgtcattatcactatcgtcttacatattcctactgaagccaagtggttgtggaaataaagagttaccatgtggatcacactcatcataccaaacgattttattctatgtttccatatacctaatagctctaggaaatggaggataccagcctaacattgctacatttggggctgatcaatttgatgaaggagataccagggaacaacattcaaaaattgtatttttcagctatttttatttggctttgaacattgggtcactcttctccaacaccatattgaattattttgaggatgatggactatggactttggggttctgggcttcagctggctctgctgctctggcattggttttgtttctttgtggcacacgaaggtatagatactttaagcctaatggaaaccctcttcctagattttgccaagtttttgtggctgctacaagaaaatggaaggtcaaggtgttacaagatgataaactttacgaggttgatgaattctcaaccgatgaagggagaaaaatgctccatactgaaggatttagattcttagacaaagcagcatttatcacatcaaagaatttcaaacaaatggaagagagtaaatgcagtccatggtatctatccactgtgacacaagtagaagaagtgaaatgcattctaagactactcccaatttggctatgcaccatattatactctgtcgtttttgctcaaatggcatcactttttgtggagcaaggcgatgccatggacactagaatatcatctttccacattcctccagcaagcatgtccacctttgacattctaagtgtagcaattgtcatcttcatttataggcgagttctcgaccctcttgtggccagaacaatgaaatcaaaaggactcactgaacttcaaaggatgggaattggtctagtcctagcaattatggccatggtttcagcaggattggtggagcactttaggctaaagaatgcaatagaagactgcaatgaatgtaaagggtctagttcactttccatattttggcaagtgccacaatatgtgtttgtgggggcatcagaagttttcatgtatgtgggtcaattagagttcttcaatgcacaaacacctgatggattaaagagttttggtagtgcactttgcatgacttcaatatcacttggaaactacgttagtagcttgcttgttgcaattgtgatgaagatttctgccacagatgagatgccaggatggatcccaggaaacttgaacaaagggcatttggatatgttttacttcctcttagcagcactcaccgcagctgatcttgtaatatatgtactgatggctaggtggtataaatatgtcaaatttcaaggaaacaatgagaatgacaccaacaaagaagaccctgaagtagtgtag

SEQ ID NO: 549 - protein, 586 aa, Glycine max
  REGION 101..504: note = Pfam Name: PTR2 Pfam Description: POT family
  REGION 1..586: note = Ceres Annot ID no. 8755099
  REGION 1..586: note = Bit score of 1291.8 for HMM based on sequences of Figure 11
  REGION 1..586: note = Functional Homolog Of SEQ ID NO. 426
MEEKVNKEHQVCTSDGAIDSQGHPAVREKTGDWVAAILILVNQGLATLAFFGIGVNLVLFLTRVMGQDNAEAANSVSKWTGTVYLFSLLGAFLSDSYWGRYMTCAIFQVIFVIGLVSLSLSSYIFLLKPSGCGNKELPCGSHSSYQTILFYVSIYLIALGNGGYQPNIATFGADQFDEGDTREQHSKIVFFSYFYLALNIGSLFSNTILNYFEDDGLWTLGFWASAGSAALALVLFLCGTRRYRYFKPNGNPLPRFCQVFVAATRKWKVKVLQDDKLYEVDEFSTDEGRKMLHTEGFRFLDKAAFITSKNFKQMEESKCSPWYLSTVTQVEEVKCILRLLPIWLCTILYSVVFAQMASLFVEQGDAMDTRISSFHIPPASMSTFDILSVAIVIFIYRRVLDPLVARTMKSKGLTELQRMGIGLVLAIMAMVSAGLVEHFRLKNAIEDCNECKGSSSLSIFWQVPQYVFVGASEVFMYVGQLEFFNAQTPDGLKSFGSALCMTSISLGNYVSSLLVAIVMKISATDEMPGWIPGNLNKGHLDMFYFLLAALTAADLVIYVLMARWYKYVKFQGNNENDTNKEDPEVV

SEQ ID NO: 550 - protein, 584 aa, synthetic construct
  REGION 1..584: note = Artificial sequence of unknown origin,
  REGION 100..504: note = Pfam Name: PTR2 Pfam Description: POT family
  REGION 1..584: note = Bit score of 1304.3 for HMM based on sequences of Figure 11
  REGION 1..584: note = Functional Homolog Of SEQ ID NO. 426
MDQKVRQFEVCTQDGSVDRHGNPAIRANTGKWLTAILILVNQGLATLAFFGVGVNLVLFLTRVMGQDNAEAANNVSKWTGTVYIFSLLGAFLSDSYWGRYKTCAIFQASFVAGLVMLSLSTGALLLEPSGCGVEESPCKPHSTVKTVIFYLSVYLIALGYGGYQPNIATFGADQFDADDSVEGHSKIAFFSYFYLALNLGSLLSNTVLGYFEDQGAWPLGFWASAGSAFAGLVLFLTGTPKYRHFKPRESPWSRFCQVLVASTRKAKIDVNYEDMNLYDSETQRTGDKKILHTKGFRFLDRAAIVTPDDEAEKVESGSTYDPWRLCSVTQVEEVKCVLRLLPIWLCTILYSVVFTQMASLFVVQGAAMKTNIKDFRIPASSMSTFDILSVAFFIFAYRRFLDPLFARLNKREPNKGLTELQRMGIGLVIAITAMISAGIVEIYRLKHKETASNSSSLSIFWQVPQYMMIGASEVFMYVGQLEFFNSQAPTGLKSFASALCMASISLGNYVSSLLVSIVMKISTRDYLPGWIPGNLNKGHLDRFYFLLAGLTAADFLVYLVCAKWYKYIKSEASFSESMDEEEEV

SEQ ID NO: 551 - protein, 596 aa, Glycine max
  REGION 110..518: note = Pfam Name: PTR2 Pfam Description: POT family
  REGION 1..596: note = Bit score of 1258.7 for HMM based on sequences of Figure 11
  REGION 1..596: note = Functional Homolog Of SEQ ID NO. 426
MSYLESQVYKERKFEEESEEVTLDGSVDFHGRPAIRAKSGRWVAAIIILLNQALATLAFFGIGVNLVLFLTRVVGQNNADAANNVSKWTGTVYIFSLVGAFLSDSYWGRYKTCAVFQVIFVIGLMSLSLSSYLFLLKPKGCGNESVNCGKHSKLEMGMFYLSIYLVALGNGGYQPNIATFGADQFDEEHSKEGHNKVAFFSYFYLAFNIGQLFSNTILVYFEDEGMWALGFWLSAGSAFAALVLFLVCTPRYRHFKPSGNPLSRFSQVLVAASRKSKVQMSSNGEDLFNMDAKEASNNANRKILHTHGFKFLDRAAFISSRDLGDQKGLGYNPWHLCPVSQVEEVKCILRLLPIWLCTIIYSVVFTQMASLFVEQGAAMKTKVSNFRIPPASMSSFDILSVAVFIFFYRRVLDPFVGKLKKTDSKGLTELQRMGVGLVIAVLAMVSAGLVECYRLKYAKQGCIHCNDSSTLSIFWQIPQYAFIGASEVFMYVGQLEFFNAQTPDGLKSFGSALCMTSISLGNYVSSLLVSVVMKISTEDHMPGWIPGNLNKGHLDRFYFLLAALTSIDLIAYIACAKWYKSIQLEANTGEIDEPEV

SEQ ID NO: 552 - protein, 526 aa, Arabidopsis thaliana
  REGION 37..446: note = Pfam Name: PTR2 Pfam Description: POT family
  REGION 1..526: note = Bit score of 1087.2 for HMM based on sequences of Figure 11
  REGION 1..526: note = Functional Homolog Of SEQ ID NO. 426
MGQDNAEAANNVSKWTGTVYIFSLLGAFLSDSYWGRYKTCAIFQASFVAGLMMLSLSTGALLLEPSGCGVEDSPCKPHSTFKTVLFYLSVYLIALGYGGYQPNIATFGADQFDAEDSVEGHSKIAFFSYFYLALNLGSLFSNTVLGYFEDQGEWPLGFWASAGSAFAGLVLFLIGTPKYRHFTPRESPWSRFCQVLVAATRKAKIDVHHEELNLYDSETQYTGDKKILHTKGFRFLDRAAIVTPDDEAEKVESGSKYDPWRLCSVTQVEEVKCVLRLLPIWLCTILYSVVFTQMASLFVVQGAAMKTNIKNFRIPASSMSSFDILSVAFFIFAYRRFLDPLFARLNKTERNKGLTELQRMGIGLVIAIMAMISAGIVEIHRLKNKEPESATSISSSSTLSIFWQVPQYMLIGASEVFMYVGQLEFFNSQAPTGLKSFASALCMASISLGNYVSSLLVSIVMKISTTDDVHGWIPENLNKGHLERFYFLLAGLTAADFVVYLICAKWYKYIKSEASFSESVTEEEEV

SEQ ID NO: 553 - DNA, 857 bp, Zea mays
  misc_feature 1..857: note = Ceres Clone ID no. 1384304
  misc_feature 1..857: note = Encodes the peptide sequence at SEQ ID NO. 554
  source 1..857: mol_type = unassigned DNA
ttactgcttcaattcgatcgttgctagaaagttgaaaccacgacatcggaggcgtgaaaaagttttaagtcacaccgaatcaatcaagtgggagggacacgttcttcaacctattaatcaaaccccactcttctcggtcacgaaagtcttggaagctttgcctgatttcgagcgacgatggacagatcggcgtcggtgggtatcaaggacggcggatttggtggcaaccacttgtattctccatcattttcttcttcatcttccatgagacatgtcaattacagttgtggatcttgtgggtacgagctgaacttgagctccaccaatcgaattacatcatcaattggatcgaagtatgggaaatccatgaagactggaatcatatccttcttcaacattgacgaggggagattcagccaggttgatgagttccaatgcatgcctcacttctccagatactcttggggtttgttcagacgcaagactaagcttctctgtcgccaatgtaataactacataggcaatgcttcttatgacaaggcccctcctgagtacgcactcgtaacacaaaactcatcgcccaggaagggtgtcactgacactgttaccaagtatgatatcagaattcgtgcgcttcaaccttcttccggtgttgcttctctgtgactgagtgtgtttcttctacaactgtatattgtagaaaattcttcaaagtatcagtactgttttcataaggtgggttcggctttttctttctttctcaaattgtacagtaatttaacaatttgccttttttttttttttttgtttctgagaatattgaggttaaatatgaatttcacttgctcatgttcatc

SEQ ID NO: 554 - protein, 162 aa, Zea mays
  REGION 1..162: note = Ceres Clone ID no. 1384304
  REGION 1..162: note = Bit score of 368.1 for HMM based on sequences of Figure 1
MDRSASVGIKDGGFGGNHLYSPSFSSSSSMRHVNYSCGSCGYELNLSSTNRITSSIGSKYGKSMKTGIISFFNIDEGRFSQVDEFQCMPHFSRYSWGLFRRKTKLLCRQCNNYIGNASYDKAPPEYALVTQNSSPRKGVTDTVTKYDIRIRALQPSSGVASL

SEQ ID NO: 555 - DNA, 495 bp, Arabidopsis thaliana
  misc_feature 1..495: note = Ceres Annot ID no. 564098
  misc_feature 1..495: note = Encodes the peptide sequence at SEQ ID NO. 556
  source 1..495: mol_type = unassigned DNA
atggagagatcagcgtcggtgggtgttaacgacggccgttttggtggcaaccaattctattcgccatctttctcttcttcttcttcttcttcttccatgagacatgttaattacagttgtggatcttgtgggtatgaactaaacctgagctccacgaatcgaatcacatcgacaatcggatcaaagtacggtaaatccatgaagagtgggatcatatctttcttcaacatcgacgagggaagattcagtcaggtcgatgagttccaatgcatgcctcacttctctagatactcttggggtttgtttcgacacagaacgaagcttctatgtcgcaaatgtaataattatatcggcaatgcttctcaggagaaggctcctgagtatgcacttgttacacaaaactcggatccgacatcgcctaggattggtagtgttacgaagtacgatatcagaatccgctcgcttcaaccttcttctgcggtcgctttgctgtga

SEQ ID NO: 556 - protein, 164 aa, Arabidopsis thaliana
  REGION 1..164: note = Ceres Annot ID no. 564098
  REGION 1..164: note = Bit score of 378.1 for HMM based on sequences of Figure 1
  REGION 1..164: note = Functional Homolog Of SEQ ID NO. 554
MERSASVGVNDGRFGGNQFYSPSFSSSSSSSSMRHVNYSCGSCGYELNLSSTNRITSTIGSKYGKSMKSGIISFFNIDEGRFSQVDEFQCMPHFSRYSWGLFRHRTKLLCRKCNNYIGNASQEKAPEYALVTQNSDPTSPRIGSVTKYDIRIRSLQPSSAVALL

SEQ ID NO: 557 - DNA, 495 bp, Populus balsamifera
  misc_feature 1..495: note = Ceres Annot ID no. 1443290
  misc_feature 1..495: note = Encodes the peptide sequence at SEQ ID NO. 558
  source 1..495: mol_type = unassigned DNA; note = Populus balsamifera subsp. trichocarpa
atggaaaaatctaaggttggcaagggagcttacctcaacgggaatccccatcattccttctcttcttcctctgcttctcaaagacatgtcagctacagctgcggtatttgcgggtatgaattgaacttgagctcctccaatcggaacacctcatctattggctctaaatatgggaaatccataaagagagggatcatctcattcttcttcatcgatgagagcagatttacccaggttgatgaattccaatgcattcccttcttttcaagaaactcctggggtttgttccaccggagaacagcacttctttgccgcaagtgtggtaataatattggaattgcttatgatgataaagcctcagcttatccacttgtagcagacggatctgactcttcctcagtcagtgaagtttccaaacatcgaaaatatgatgttaaaatccgtgccttgcagccttcttctgttgaccagtttagcactccaattcacacctga

SEQ ID NO: 558 - protein, 164 aa, Populus balsamifera
  REGION 1..164: note = Ceres Annot ID no. 1443290
  REGION 1..164: note = Bit score of 417.4 for HMM based on sequences of Figure 1
  REGION 1..164: note = Functional Homolog Of SEQ ID NO. 554
  source 1..164: note = Populus balsamifera subsp. trichocarpa
MEKSKVGKGAYLNGNPHHSFSSSSASQRHVSYSCGICGYELNLSSSNRNTSSIGSKYGKSIKRGIISFFFIDESRFTQVDEFQCIPFFSRNSWGLFHRRTALLCRKCGNNIGIAYDDKASAYPLVADGSDSSSVSEVSKHRKYDVKIRALQPSSVDQFSTPIHT

SEQ ID NO: 559 - DNA, 936 bp, Glycine max
  misc_feature 1..936: note = Ceres Clone ID no. 1042157
  misc_feature 1..936: note = Encodes the peptide sequence at SEQ ID NO. 560
  source 1..936: mol_type = unassigned DNA
attatcttcttcttctctacctttcgatcctttcactttggcgtgaccgaaccattccactccctcgcaaaacggtgtcgtgccgatcgcgttcgttcggttaaactcgcgcgttcagaatcctccggaacaacgctcttcgcccaattccctataattcactcctctctctctctcgctttctctggtaacctcctcgcgacggtggctcttccgcattccgccgccgccactgccatcgccgttgccgccgccggaaaacactaatcaatagatggatgattctgcgttcaaacgaggcggtcactttaatcgaacttactcgtgctcttctcagagagatgtctgttacagctgtggcacttgtggttatgagctgaacctatcctcctcaaaccggaacactgcatccattggatctaaatacgggaagtccataaagcgaggtattatatcattcttcagcattgatcttagcagatttactcaggttgatgaaattcagtgtgtgccccattttgataagcactcatggggtttgtttcgccgaagaaccaagcttctttgtcgcaagtgtggcaaccatattggaaatgcatacaatggttacacttcgtcctttcctcttgtgtcagacggagcagaatcatctcctagttccaaagtggtcagtcatacaaaatatgacattcgcatttgtgccttacaaccttcatcttctgaagaatctggaatccccgtgtttgcttgaactacctggtaaaaatagtaattcctacacagccaaatccggtgacagggtggttagaagttcattaatatatgcagatggtttggcttgttttttgtgcttttcctaatgaaaatgtgactaatagtcgtgtgaaagagttgtaagaattaaattaaaaattattacaggtgtgggattttatg

SEQ ID NO: 560 - protein, 158 aa, Glycine max
  REGION 1..158: note = Ceres Clone ID no. 1042157
  REGION 1..158: note = Bit score of 404.0 for HMM based on sequences of Figure 1
  REGION 1..158: note = Functional Homolog Of SEQ ID NO. 554
MDDSAFKRGGHFNRTYSCSSQRDVCYSCGTCGYELNLSSSNRNTASIGSKYGKSIKRGIISFFSIDLSRFTQVDEIQCVPHFDKHSWGLFRRRTKLLCRKCGNHIGNAYNGYTSSFPLVSDGAESSPSSKVVSHTKYDIRICALQPSSSEESGIPVFA

SEQ ID NO: 561 - DNA, 994 bp, Gossypium hirsutum
  misc_feature 1..994: note = Ceres Clone ID no. 1919714
  misc_feature 1..994: note = Encodes the peptide sequence at SEQ ID NO. 562
  source 1..994: mol_type = unassigned DNA
gagcgcgttccctcttctctagaaactgctgctgtttttttttcatccttttaactcagtccctgaaaattgagccgttaacgtcaacccgattcaggcggaaccgtttcctcactcaaaatcctcgcacaaactcagcagttaattaaacacttcataaagttgagtcgctttattagcacagttgccgttatagtgataatcaaaggtgttgattctgtaggaagaaggaaaaaagtaatggagaaatctgtttttgttaaagatgtacaacaactcaatggaaatctccaccattctttttcctctgtttctcaaagagatgtaacttacagctgtggttcttgtgggtatgagctaaacctaagttcctctagtagaaacaccgcaacaatcggctctaaatatggaaaattgattaagcgagggatgatatcattcttcaatatagacgagaccagatttacgcaggtcgatgaattccaatgcagaccctacttttcgaagcactcatggggtttattccgccatagaaccaaattactttgtcgcaagtgtgggaaccacattggcgatgcttatgatgataaatcttctggctaccctcatgtcttagatggttctgattcatcctccggcactgaaccttctaaccatagaaaatatgatgttagaatccgtgccctacagccttcgactgctgaaggactcggctctccactttttgcgtgatttcctgcagtgcatcattgatggtcttcggtttgaattatcaacgactgactgagcgttttcgtatgggattattgctgtctattagttggtttgagtcttccattttatgctgtctttgctgtgtttctgttaagtgtatatatgaaaggtaagtaatgtggagctttaaaatgaggttgagcacagtaatgtcattacccaaatttaagtgtaatatctgtttgagttgaattaaatcaagtatttttcttttggcctt

SEQ ID NO: 562 - protein, 163 aa, Gossypium hirsutum
  REGION 1..163: note = Ceres Clone ID no. 1919714
  REGION 1..163: note = Bit score of 433.3 for HMM based on sequences of Figure 1
  REGION 1..163: note = Functional Homolog Of SEQ ID NO. 554
MEKSVFVKDVQQLNGNLHHSFSSVSQRDVTYSCGSCGYELNLSSSSRNTATIGSKYGKLIKRGMISFFNIDETRFTQVDEFQCRPYFSKHSWGLFRHRTKLLCRKCGNHIGDAYDDKSSGYPHVLDGSDSSSGTEPSNHRKYDVRIRALQPSTAEGLGSPLFA

SEQ ID NO: 563 - protein, 164 aa, Vitis vinifera
  REGION 1..164: note = Public GI ID no. 157336039
  REGION 1..164: note = Bit score of 402.2 for HMM based on sequences of Figure 1
  REGION 1..164: note = Functional Homolog Of SEQ ID NO. 554
MENSMVLAHETQPHRDFSASSLRDVSYSCGSCGYELKLCSSNRNTKNIGSKYGKNIKRGVISFLQVDESRFTLVDEFKCIPYFISRHSWGLFCHRTKLLCRKCSNHVGNAYVRKSPYPLVLDESDSAPAPATATTDISTCRKYDIRLRALQPSSSEPSAIPLLT

SEQ ID NO: 564 - DNA, 459 bp, Solanum lycopersicum
  misc_feature 1..459: note = Ceres Annot ID no. 8454153
  misc_feature 1..459: note = Encodes the peptide sequence at SEQ ID NO. 565
  source 1..459: mol_type = unassigned DNA
atggacatcagtcatgacttagcaaaagttgattcgatgccaaacaaaaactcatctccctgctgtggcagttgtgggtatgagttaaatcttaattcatcaagtcgcaatactgcttccattgggtccaagtatgggaagtccattaagaaagggatgatctccttcttgtccattgatgagagcagatttacccaggttgatgaattcaagtgtgtaccgttctttttctccaaacgttcttggggcttgttccagcggcgaacaaaacttcagtgcagaaaatgtggtaacgatattggaattgcttatgatgatagtgcttcttcttacccacttgtagccgatgcatcagatacagcctccggtagtgaaataaccactcataggaaatacaatatcaaaatccgctcgttgcaaccgtcttcctcagcatcgggtactcctctccctgagtga

SEQ ID NO: 565 - protein, 152 aa, Solanum lycopersicum
  REGION 1..152: note = Ceres Annot ID no. 8454153
  REGION 1..152: note = Bit score of 376.0 for HMM based on sequences of Figure 1
  REGION 1..152: note = Functional Homolog Of SEQ ID NO. 554
MDISHDLAKVDSMPNKNSSPCCGSCGYELNLNSSSRNTASIGSKYGKSIKKGMISFLSIDESRFTQVDEFKCVPFFFSKRSWGLFQRRTKLQCRKCGNDIGIAYDDSASSYPLVADASDTASGSEITTHRKYNIKIRSLQPSSSASGTPLPE

SEQ ID NO: 566 - DNA, 1007 bp, Oryza sativa
  misc_feature 1..1007: note = Ceres Annot ID no. 1722302
  misc_feature 1..1007: note = Encodes the peptide sequence at SEQ ID NO. 567
  source 1..1007: mol_type = unassigned DNA
agagccagccgagccagcgcggcgcggtcgcctttgccctgccctgcactgaccgttggagagccaagcaacccaacccaagcgctcttctcttctcctcctcttcctcccaaatcgatcgggatccgatgcgcacggaggaggaaggagcatggtgaggacgcccgagaggagctactcctgctcctccgccaaggaagtcgcctacagctgtggttactgtggctatgcattgaacctgagctcctcaacacggaacacagcgaacattggatccaagtatggtaagcagatcaggaaaggtgtaatctcattctttgcgatcgacgagagtcggttcacacaaactgatgaggtgagctgcatgccatacttccattcaaggcgctcctggggtttgttcagaaagaggacaaggttgatctgccgcaaatgtggtggccgtatcggtaatgcttatgaggatgaggattccacattgtatgatggttcagatgatttgcacatgagctccgagggctacagcatgtcgagtggaaagaaatatgttatcaagattaatgcactgcagccttcaaccgatgactctggtgttcccttcaccctgtgatgctgttctgaacttctgcagtatgcacttttcgattcttgccttgcgctatactggactgtcaatcaagtaactgcagaaccaagagattacgtgctagtgtgtaactgtatattttgataggaatgctgaattttgcctacctgtatttataaaatggaagagtttgttgtctatttacatatacattcagagttcagtgggtgtgcaactgtgcatcatggacctggatttggcaatccatatttgggcaaatgtttagttagaaatcaggtttctgatgatgttcagtggtgtgtacttgtgtcttgtactgaaatattgtagtgtcttttgattttttgtgtatctaaagaatgatgtaaatcttcagctattctaaacggcagtttttttt

SEQ ID NO: 567 - protein, 152 aa, Oryza sativa
  REGION 1..152: note = Ceres Annot ID no. 1722302
  REGION 1..152: note = Bit score of 374.0 for HMM based on sequences of Figure 1
  REGION 1..152: note = Functional Homolog Of SEQ ID NO. 554
MVRTPERSYSCSSAKEVAYSCGYCGYALNLSSSTRNTANIGSKYGKQIRKGVISFFAIDESRFTQTDEVSCMPYFHSRRSWGLFRKRTRLICRKCGGRIGNAYEDEDSTLYDGSDDLHMSSEGYSMSSGKKYVIKINALQPSTDDSGVPFTL

SEQ ID NO: 568 - DNA, 450 bp, Sorghum bicolor
  misc_feature 1..450: note = Ceres Annot ID no. 8733140
  misc_feature 1..450: note = Encodes the peptide sequence at SEQ ID NO. 569
  source 1..450: mol_type = unassigned DNA
atggcgagggccctcgaccgctacacctccggcaaggatgtcgcctacagttgtggatactgtggctatgcattaaacttgagctcctccgcacggaacacagcgaacattggatccaagtatggcaagcacatcaggaaaggcgttgtctcattctttgcaatcgatgagagccgttttacacaaactgatgaggtgagctgcaccccgtacttccattcaagccattcatggggattcttcagaaatagaacacggttgctctgccggaagtgcagtggtcatattggtaatgcttatgaagatgaggatcccaccttgtgcgatgggtcagatgacctggacatgagctccaagggcagcagcacatcccctcggaagaaatatgttattaagatcaatgcactgcagccctcatcagatgactctggagctctcttctccccgtga

SEQ ID NO: 569 - protein, 149 aa, Sorghum bicolor
  REGION 1..149: note = Ceres Annot ID no. 8733140
  REGION 1..149: note = Bit score of 356.4 for HMM based on sequences of Figure 1
  REGION 1..149: note = Functional Homolog Of SEQ ID NO. 554
MARALDRYTSGKDVAYSCGYCGYALNLSSSARNTANIGSKYGKHIRKGVVSFFAIDESRFTQTDEVSCTPYFHSSHSWGFFRNRTRLLCRKCSGHIGNAYEDEDPTLCDGSDDLDMSSKGSSTSPRKKYVIKINALQPSSDDSGALFSP

SEQ ID NO: 570 - DNA, 495 bp, Populus balsamifera
  misc_feature 1..495: note = Ceres Annot ID no. 1452096
  misc_feature 1..495: note = Encodes the peptide sequence at SEQ ID NO. 571
  source 1..495: mol_type = unassigned DNA; note = Populus balsamifera subsp. trichocarpa
atggaaaaatctacggctttcagggaagcttacctcaacgggaatcaccatcattccttttcttcttcctctgcttctcatagacatgttagctacagctgcggtatctgcgggtatgagttgaacttgagctcctccaatcgaaacacgtcaacaattggctctaaatatgggaaatccataaagcgagggaaaatctcattcttcttcatcgatgagagtagatttactcaggttgatgaattccaatgctttcccttcttttcaaaaaactcccttggtttgttccgccagagaactgcacttctttgccgcaagtgtggtaatcacattggaattgcttatgctgatgaagcttcagcttatccacttgtagcagacggatctgactcttcctcagtcagtgaagttttcaaacgtcgaaaatatgatgttaaaatccgtgccttgcagccttcttctgccgagcagtttagcattccactttacacctga

SEQ ID NO: 571 - protein, 164 aa, Populus balsamifera
  REGION 1..164: note = Ceres Annot ID no. 1452096
  REGION 1..164: note = Bit score of 385.9 for HMM based on sequences of Figure 1
  REGION 1..164: note = Functional Homolog Of SEQ ID NO. 554
  source 1..164: note = Populus balsamifera subsp. trichocarpa
MEKSTAFREAYLNGNHHHSFSSSSASHRHVSYSCGICGYELNLSSSNRNTSTIGSKYGKSIKRGKISFFFIDESRFTQVDEFQCFPFFSKNSLGLFRQRTALLCRKCGNHIGIAYADEASAYPLVADGSDSSSVSEVFKRRKYDVKIRALQPSSAEQFSIPLYT

SEQ ID NO: 572 - DNA, 897 bp, Glycine max
  misc_feature 1..897: note = Ceres Clone ID no. 1645639
  misc_feature 1..897: note = Encodes the peptide sequence at SEQ ID NO. 573
  source 1..897: mol_type = unassigned DNA
ccttcattcatctcaaaatgaaaaattccgtgtttaacaacaaagcacaagttcaccaaaatcgaacttgctcctcctattcctattcctactcttctcagagggatgtctgctacagttgtggtacatgcgggtatgagcttaacctatcctcctctaaccggaatatatcatccatcggttcaaaatatgggaaatccataaagcgaggcattatatcattcctcaacgttgatgacagcagattcacccgcgccgatgaaattgaattcgccccatatttttcaaagcacaagtggggtttgttccgccgaaaaaccaagcttctttgtcgcaagtgttgcaaccatattggatatgcctacaacgatcgcacttcatcattttttcccttcgtatcaaacagaacagaaccatcaccacccaccgaagcatcaaattcaagtccaatgaaatacgatattcgcattcgtgctttacaaccttcatcttctcaagaacatggaatcactgtgttggcttaaaatttcaaatacgcggtaaaaaattgttatcactaactacggggaggttgtgatttcattttttttttttttttatagatttgaagttctgttttggcaagggtgttgtgttcccctttccctgtgtctcaagtgtgattaatatacacttgtatactagaagtagtagctgtggaatttttggaatgttaagttaaattttgcaaaacaacgaagatagaaagaatatttatggtggtgctacttcgtaaatcagaagatattatctagttttgaatagtcagatatcaggagtggattgcccggcctcacaatgtatgaatataatgttgatatataatcgtatattgtatggtataatattattttcagc

SEQ ID NO: 573 - protein, 168 aa, Glycine max
  REGION 1..168: note = Ceres Clone ID no. 1645639
  REGION 1..168: note = Bit score of 298.1 for HMM based on sequences of Figure 1
  REGION 1..168: note = Functional Homolog Of SEQ ID NO. 554
MKNSVFNNKAQVHQNRTCSSYSYSYSSQRDVCYSCGTCGYELNLSSSNRNISSIGSKYGKSIKRGIISFLNVDDSRFTRADEIEFAPYFSKHKWGLFRRKTKLLCRKCCNHIGYAYNDRTSSFFPFVSNRTEPSPPTEASNSSPMKYDIRIRALQPSSSQEHGITVLA

SEQ ID NO: 574 - protein, 154 aa, Vitis vinifera
  REGION 1..154: note = Public GI ID no. 157344920
  REGION 1..154: note = Bit score of 220.8 for HMM based on sequences of Figure 1
  REGION 1..154: note = Functional Homolog Of SEQ ID NO. 554
MEMLAGEDDRSSGFHHLHLSCSLRDVHYSCGSCGYQLNLNSCNRTSVLGSKYEKSIKKGIISFFSIDETRFTQTNELRCLPYFNSRCSWGLFRRRSKLLCKKCGNHIGNAYKTNNRSGKLDSSAWDGISDSSRIYDIKICALQPSSSLESDAFV

SEQ ID NO: 575 - protein, 157 aa, Oryza sativa
  REGION 1..157: note = Public GI ID no. 115440865
  REGION 1..157: note = Bit score of 302.5 for HMM based on sequences of Figure 1
  REGION 1..157: note = Functional Homolog Of SEQ ID NO. 554
  source 1..157: note = Oryza sativa subsp. japonica
MVRSLDSYPSIKDVTYSCGYCGYALNLSSSTRNTANIGSKYGKQIKKGVVSFFAVDESRFTQADEVTCVPYFHSRRSWGLFRRRSRLLCRKCGGRIGSAYEEDEPAAAALPACDGPDDLRTTSSGSSGSASSQKNYVIKINALQPSSDDSDAVAFTL

SEQ ID NO: 576 - DNA, 761 bp, Zea mays
  misc_feature 1..761: note = Ceres Clone ID no. 340925
  misc_feature 1..761: note = Encodes the peptide sequence at SEQ ID NO. 577
  source 1..761: mol_type = unassigned DNA
ggccaagccaagcaatcaagcgggggtgtcggtccgccgagcggagggcgagcatggtgagggccctcgaccgctactcctccggcaaagatgtcgcctacagctgtggatactgcggcttcgcgttgaacttgagctcctccacgcggaacacggccaacattgggtccaagtacggcaagcacatcaggaaaggcgtcgtctccttcttcgcgatcgacgagagccgcttcacgcaggccgacgaggtgagctgcacgccgtacttccgctccagccgttcgtggggcttcttcaggaacaggacgcggctgctctgccggaagtgcggtggccacactggttatgcctacgaagacgagggtcccgccctgcgcgacgaggggccagcagatgacctggacatgagctccagctccaggggaagcagcacgtcccctcggaagaagtatgttatcaagatcagtgcgctgcggccgttatcagacgactctggtgctctcctctccccgtgatggcgatctggattctgagctgcagccatgtgtaaattaagggatagtggttctcttcagttacttcgtgagcagaatttttttggtttattgtacgttacaagttacatcatgttcatatttattttgtgtaataaggtgtggttgatgtaatatcttgtttatgattaggtcatggagataatagacatctagctttagcattgatgttcctgtttgctagtcagtaaattaagggatttgatc

SEQ ID NO: 577 - protein, 153 aa, Zea mays
  REGION 1..153: note = Ceres Clone ID no. 340925
  REGION 1..153: note = Bit score of 299.1 for HMM based on sequences of Figure 1
  REGION 1..153: note = Functional Homolog Of SEQ ID NO. 554
MVRALDRYSSGKDVAYSCGYCGFALNLSSSTRNTANIGSKYGKHIRKGVVSFFAIDESRFTQADEVSCTPYFRSSRSWGFFRNRTRLLCRKCGGHTGYAYEDEGPALRDEGPADDLDMSSSSRGSSTSPRKKYVIKISALRPLSDDSGALLSP

SEQ ID NO: 578 - DNA, 516 bp, Sorghum bicolor
  misc_feature 1..516: note = Ceres Annot ID no. 8669404
  misc_feature 1..516: note = Encodes the peptide sequence at SEQ ID NO. 579
  source 1..516: mol_type = unassigned DNA
atggacaggtctctcgacagaaactcctccatcaaggacgtcacttatagctgcgggtactgcggctacgcgctgaacctgagctcctcggcgcgggacacggagggcatcgggtgctccaagtaccgcaagcagatcaagaagggcgtcgtcgccttcgtcgcggtggacgagacccggttcacgctcgccgacgaggtcacctgcatgccctacttccgctccgcccgctcctggggcctcttcaggaggcgggcgcgcctgctctgccgcaagtgcggcggacgcatcggcaacgcctacgaggaggaggacgacgccagggactactccagctccagcctcttcgacggcgacggcgacggctcctcggatgacatgcgccggagctccggcttgggctcgggccgcagcagcatcgtgtcgtcgagccagaagaactacgtgatcaagatcagcgcgctgcagccgtcgtcagatgattctgctgctgttgttcccttcacacatcgatga

SEQ ID NO: 579 - protein, 171 aa, Sorghum bicolor
  REGION 1..171: note = Ceres Annot ID no. 8669404
  REGION 1..171: note = Bit score of 236.2 for HMM based on sequences of Figure 1
  REGION 1..171: note = Functional Homolog Of SEQ ID NO. 554
MDRSLDRNSSIKDVTYSCGYCGYALNLSSSARDTEGIGCSKYRKQIKKGVVAFVAVDETRFTLADEVTCMPYFRSARSWGLFRRRARLLCRKCGGRIGNAYEEEDDARDYSSSSLFDGDGDGSSDDMRRSSGLGSGRSSIVSSSQKNYVIKISALQPSSDDSAAVVPFTHR

SEQ ID NO: 580 - DNA, 619 bp, Gossypium hirsutum
  misc_feature 1..619: note = Ceres Clone ID no. 100028078
  misc_feature 1..619: note = Encodes the peptide sequence at SEQ ID NO. 581
  source 1..619: mol_type = unassigned DNA
attcagagaggatgtcccaagctcacgtctcttacagctgtggatcttgtggttaccctttgaacttgacctcttccaatcgaatcgccaccagcataggctctgaatatcgcaaatccgtagagaaaggtcttatctcctttctatctgttgatcttagtcgattcacacaagtcgacgaggtacattgctttcctgtcagttggggccgtcatcgatcaaaaactaaactactttgccgtaaatgtggggttcatgtagggtatgggtatggagatgcgcctgccctttgtggttttgactctcccgactcatctagtgctgcttttaggaagtttacaataaagatccgagctctacagccttcagacgagtgctaacaaggttgacatgggagattctttatggacggtgttacttcgatcatgctcctacctgatgattgcctctgttttattttcaattttcttgactgtaggaatgaccgtgaatcatttggcctaacttgccaccgctggcttaatattcaaaacttgaatcgtcggtccttgcaatttccatgttctttcggcattgttggcccttcctcgttatctcagagctgtaccgatatcaactc

SEQ ID NO: 581 - protein, 122 aa, Gossypium hirsutum
  REGION 1..122: note = Ceres Clone ID no. 100028078
  REGION 1..122: note = Bit score of 148.3 for HMM based on sequences of Figure 1
  REGION 1..122: note = Functional Homolog Of SEQ ID NO. 554
MSQAHVSYSCGSCGYPLNLTSSNRIATSIGSEYRKSVEKGLISFLSVDLSRFTQVDEVHCFPVSWGRHRSKTKLLCRKCGVHVGYGYGDAPALCGFDSPDSSSAAFRKFTIKIRALQPSDEC

SEQ ID NO: 582 - DNA, 471 bp, Populus balsamifera
  misc_feature 1..471: note = Ceres Annot ID no. 1503869
  misc_feature 1..471: note = Encodes the peptide sequence at SEQ ID NO. 583
  source 1..471: mol_type = unassigned DNA; note = Populus balsamifera subsp. trichocarpa
atggaatcatggattgggtttagatgtgtgcttgaaatagtgtgttcatttcttcgaaaaagaaagaaaagctgcggttcttgtgggtatcagttaaacttgaactcttgcaaccggaacactccagatattggagttaattacaagaaatccataaagaaaggaagtatttcattcttcagcattgatgaaaccaggttcactcaaattgaagaacttcgatgtacaccatacttcaattccatgcgttcctggggtttattccagcgaagaaccaagcttctttgttacaaatgtggaaatcatcttgggattgcttacaaagagaataatacctcttcctcccctctcagattggggaaatgtcgatcagatttgatctcttgggatgggatttctgatgccagaatttatgttatcaagatacgttccttgcagcctgcttctactgaggactatagtttgagctga

SEQ ID NO: 583 - protein, 156 aa, Populus balsamifera
  REGION 1..156: note = Ceres Annot ID no. 1503869
  REGION 1..156: note = Bit score of 190.6 for HMM based on sequences of Figure 1
  REGION 1..156: note = Functional Homolog Of SEQ ID NO. 554
  source 1..156: note = Populus balsamifera subsp. trichocarpa
MESWIGFRCVLEIVCSFLRKRKKSCGSCGYQLNLNSCNRNTPDIGVNYKKSIKKGSISFFSIDETRFTQIEELRCTPYFNSMRSWGLFQRRTKLLCYKCGNHLGIAYKENNTSSSPLRLGKCRSDLISWDGISDARIYVIKIRSLQPASTEDYSLS

SEQ ID NO: 584 - DNA, 453 bp, Populus balsamifera
  misc_feature 1..453: note = Ceres Annot ID no. 1525651
  misc_feature 1..453: note = Encodes the peptide sequence at SEQ ID NO. 585
  source 1..453: mol_type = unassigned DNA; note = Populus balsamifera subsp. trichocarpa
atgacaaaagaatttactgggggtggtcctttcaatcaaccagatcctgctaaaggggagcgtaaaacaaggcaatctgcaagaattaagcttctgtttgagctgcaaagctgtggctcttgtggataccccttgaatttaacatcttccaatcgaatcacctccaacataggttctggatatcagaaatctataaagaaaggttatatctccttcctttctgttgatcttagtcgattcacacaggttgatgaggtaaactgtcttcctgtgtcttggggtcgttatcattcaaaaagtaaacttctttgtcgtaaatgtggggttcacgtaggctatggatatggagattcgcccgctctatgtggttttgactctcccaactcatcaagctcagcttataaaaaatttaccataaagatccgagctctacagccttcagaagagtgctaa

SEQ ID NO: 585 - protein, 150 aa, Populus balsamifera
  REGION 1..150: note = Ceres Annot ID no. 1525651
  REGION 1..150: note = Bit score of 143.5 for HMM based on sequences of Figure 1
  REGION 1..150: note = Functional Homolog Of SEQ ID NO. 554
  source 1..150: note = Populus balsamifera subsp. trichocarpa
MTKEFTGGGPFNQPDPAKGERKTRQSARIKLLFELQSCGSCGYPLNLTSSNRITSNIGSGYQKSIKKGYISFLSVDLSRFTQVDEVNCLPVSWGRYHSKSKLLCRKCGVHVGYGYGDSPALCGFDSPNSSSSAYKKFTIKIRALQPSEEC

SEQ ID NO: 586 - DNA, 1076 bp, Panicum virgatum
  misc_feature 1..1076: note = Ceres Clone ID no. 2031281
  misc_feature 1..1076: note = Encodes the peptide sequence at SEQ ID NO. 587
  source 1..1076: mol_type = unassigned DNA
aaatcgcccgaggaaaagcgcgcggcagggcaggagacgccgatcccccgtgtccgttggcgagcgagaccgaggcccgaccaaacaaccgccccgcctttttagccagccggccgttcgtcgcccccgctctcccccccactcgccccacgtctcctctgtctctccgatcggcaggagggaaaagtggacggctccagcgaagcgagcgccaccgtcgccttcgcctcgccatggagaggtctctcgacagcagctactccgcctccatcaaggacgtcacatacagctgcgggtactgcggctacgcgctgcacctgagctcctcggcgcgggacacggcgggcatcggctccaagtaccgcaagcagatcaagaagggcgtggtcgccttcgtcgccgtcgacgagagccgcttcacgctcaccgacgaggtcacctgcatgccctacttccgctccaggcgtgcctggggcctcctcaggaagcgttcgcgcctgctctgccgcaagtgcggcggccgcatcggcgacgcctacgaggaggaggacagggactccggcctcagcgacggcgacgccttctcggacgacctgcgcgcgagcttgggctccggtggcagcggcagcagcgcgtcgagccagaggaactacgtgatcaagatcagcgcgctgcagccgtcgtcagacgattctgacgcagctgccttcacactatgatgaagatagatggcgtcgggttgctgcaaggcgctcttcttccagcttggttgaattcgacttttgtgttatcagggatgcgactttgtaagcgcgggaggaaatacagcaagaaagagcttggcacagctgagaacttttcagatggtaaccaactgcatgctgttttcagacatcttgctgtcagtagtgctcttcgtttcctatgtaaatttgtgaaatgtacagcttggttattgaatttttctttgtattaggaaatgattaggtttgctgtatgttagttgatcccatagaatttgtactgtgtcataactcatgatccaccacggttgcaattttgagtagtcttgcttc

SEQ ID NO: 587 - protein, 161 aa, Panicum virgatum
  REGION 1..161: note = Ceres Clone ID no. 2031281
  REGION 1..161: note = Bit score of 255.8 for HMM based on sequences of Figure 1
  REGION 1..161: note = Functional Homolog Of SEQ ID NO. 554
MERSLDSSYSASIKDVTYSCGYCGYALHLSSSARDTAGIGSKYRKQIKKGVVAFVAVDESRFTLTDEVTCMPYFRSRRAWGLLRKRSRLLCRKCGGRIGDAYEEEDRDSGLSDGDAFSDDLRASLGSGGSGSSASSQRNYVIKISALQPSSDDSDAAAFTL

SEQ ID NO: 588 - DNA, 1157 bp, Zea mays
  misc_feature 1..1157: note = Ceres Clone ID no. 483742
  misc_feature 1..1157: note = Encodes the peptide sequence at SEQ ID NO. 589
  source 1..1157: mol_type = unassigned DNA
aggatacctgattaaagaattgcttaactagcagcggcgcaaagcctcggccggaggccaatcctccgtgtccggtcgggcgcaacccgaccaaacaacttccttttaagcaaaccgctcgcgttcctgaattcctgacccccgctctctctcccccacccgcactcgccccacgtctcctctctcccgtcccgtctgctctctgatcagcaggagagaaaggtggatgcgccagcgaagcgagcaccgtccctaatcgtcggccatggagaggtctctcgacagctactcctccatcaaggacgtcacctacagctgcgggtactgcgggtacgcgctgaacctgagctcctcggcgcgggacacggagggcatcgggcccaagtaccgcaagcagatcaggaagggcgtcgtcgccttcgtcgcggtcgacgagagccggttcacgctggcccacgagctcacctgcacgccctacttccgctccgcccgctcctggggcctcttcaggaggcggtcgcgcctgctctgccgcaagtgcggggggcacatcggcagcgcctacggctacggggaggaggaggaggacgccagggactccagctcctccagcctcttcggcggtgacggctcctcggatgacacgcgcccgagctccggctcgggccgcagcagcgtcgcgtcgagccagaagagctacgtggtcaggatcagcgcgctgcagccgtcttcggatgactctgctgtcgttcccttcacgcatcgatgatgcattgcaggtgtcgagttggtgtgccgtgttcttcttccagcctggatgaatttgaatttgctgtaacctgggatggcgatggactgcaggaggacgaagtggagcaagggaagatatttcttggcgtgtctagacttttcagaggtttgatcagctgcatgctgctttcagtcatcttgctgtttgtaatgcctctgtgtttcctctgtacattggtaagtatagagcaacatggtttttgaaattttggttggtgtcgtgtaaatgattaaaggttttctgtatttcgattgattctatagcgtttgtattatgtcatagaattgaaattttgattagtcttgtactcttgtctcgcttgcatgtgtggatgttttagcttccc

SEQ ID NO: 589 - protein, 167 aa, Zea mays
  REGION 1..167: note = Ceres Clone ID no. 483742
  REGION 1..167: note = Bit score of 231.0 for HMM based on sequences of Figure 1
  REGION 1..167: note = Functional Homolog Of SEQ ID NO. 554
MERSLDSYSSIKDVTYSCGYCGYALNLSSSARDTEGIGPKYRKQIRKGVVAFVAVDESRFTLAHELTCTPYFRSARSWGLFRRRSRLLCRKCGGHIGSAYGYGEEEEDARDSSSSSLFGGDGSSDDTRPSSGSGRSSVASSQKSYVVRISALQPSSDDSAVVPFTHR

SEQ ID NO: 590 - DNA, 674 bp, Zea mays
  misc_feature 1..674: note = Ceres Clone ID no. 100802111
  misc_feature 1..674: note = Encodes the peptide sequence at SEQ ID NO. 591
  source 1..674: mol_type = unassigned DNA
cgcgccccactccccagacgccgtcgcctagatccatgagacttcccgatcttcctgcggcccgaggatgtcccagagcgacgtcgactacagttgcggatcttgtggataccctctaaacctttcatcttctaaccgaagcacatctgaagtaggctcatataagaagtctctgaagaaaggactgatttcattcatttctgttgatctcagccgatttactcaggtggacgaggtatcttgctttcccctcacctggcgtggttacaggccaaaaactaagcttctgtgccgaatatgtggggcatctattggctacggatacggtgagccggctgttttgtgtagttttgatccagcaagttcatcttcctccagtacatcccagaagtatttaataaagatccaagcactccaaccttcagacaggactcagtaagtgaaatatggaaagagaggaaataggtgtcagcctagagaactccatcagttacctatctgatgattgcttgctttctatatttaacaagctagaaagcgggtcagagaggagtgctttcggtttaacttgcaagaattggttcaaggttcggaaccttggccggaaatcactaacattccattgttcttttaatcctgccatagacaaggagcatgccaagtgcatccccaag

SEQ ID NO: 591 - protein, 123 aa, Zea mays
  REGION 1..123: note = Ceres Clone ID no. 100802111
  REGION 1..123: note = Bit score of 137.0 for HMM based on sequences of Figure 1
  REGION 1..123: note = Functional Homolog Of SEQ ID NO. 554
MSQSDVDYSCGSCGYPLNLSSSNRSTSEVGSYKKSLKKGLISFISVDLSRFTQVDEVSCFPLTWRGYRPKTKLLCRICGASIGYGYGEPAVLCSFDPASSSSSSTSQKYLIKIQALQPSDRTQ

SEQ ID NO: 592 - DNA, 799 bp, Triticum aestivum
  misc_feature 1..799: note = Ceres Clone ID no. 1460255
  misc_feature 1..799: note = Encodes the peptide sequence at SEQ ID NO. 593
  source 1..799: mol_type = unassigned DNA
atcagctcgccaccagcaagcaaccgctctttttagtccccactcgctccacgatccctcccccactccggccggccacgcgcaaagcgaaacgctccccgactccggccaagagctccagcgccgccgccgccgaccgtcgttcgtccatatggtgaggtccaactccatcgacagctgctactcctccatccaggacgtcacctacagctgcgggtactgcggctacgcgctgaacctgagctcggcggcgcggaacacggccaacatcggctccaagtacggcaagcagatcaggaagaagggcatcgtggccttcgtcgccgtcgacgagacgcgcttcacgcaggccgacgaggtcacctgcgcgccccgcctccgcccctggacctggcgcctcttccggcggaggtcgcgcctgctctgcggcaagtgcggcggccgcatcggcgccgcctacgaggtcgacgaggaggacgaggaccccgccggcctctccgcgtgcggcggctcggacgacgacgacgacgacctgcggacgagcccgggcgatgatgtcggcgcgtccagaaggaggaactacctgatcaggatcggcgcgctgcagccctcgacggacgatcctcctcctgccgatcccttctctctatgatatgatatgatattgatatgacacaccgctgctgaattttgttcctttgttcatagtggaagacgacccgagagcttgatgtgtgtaagttgatcctgctatagtttttgtgtcctggtaatggagtgagccatggttgcaattttg

SEQ ID NO: 593 - protein, 166 aa, Triticum aestivum
  REGION 1..166: note = Ceres Clone ID no. 1460255
  REGION 1..166: note = Bit score of 204.0 for HMM based on sequences of Figure 1
  REGION 1..166: note = Functional Homolog Of SEQ ID NO. 554
MVRSNSIDSCYSSIQDVTYSCGYCGYALNLSSAARNTANIGSKYGKQIRKKGIVAFVAVDETRFTQADEVTCAPRLRPWTWRLFRRRSRLLCGKCGGRIGAAYEVDEEDEDPAGLSACGGSDDDDDDLRTSPGDDVGASRRRNYLIRIGALQPSTDDPPPADPFSL

SEQ ID NO: 594 - DNA, 870 bp, Arabidopsis thaliana
  misc_feature 1..870: note = Ceres Clone ID no. 26006
  misc_feature 1..870: note = Encodes the peptide sequence at SEQ ID NO. 595
  source 1..870: mol_type = unassigned DNA
aaaaagtacgaaaggaaaatatgagtgaggagaagaggaagcaacacttcgtgctagtacatggtgcgtgccacggcgcatggtgctggtacaaggttaagcctcttctcgaggctttgggccatcgtgtaaccgccttagacctagctgcttccggtatagacacaaccaggtcaatcactgacatttctacatgtgaacaatattctgagccattgatgcagctaatgacttcattgccgaatgatgagaaggttgtactcgttggtcatagctttggaggtttgagtttagccttagccatggataagtttcccgataaaatctctgtctctgtcttcgtgactgcattcatgcccgacaccaaacactcaccatcgttcgtcgaggaaaagtttgcaagcagcatgacaccagaaggatggatgggctctgagctcgagacatatggttcagataattccggcttgtctgtgttcttcagcaccgacttcatgaagcaccgtctctaccaactttctcctgtggaggatcttgagcttggattgcttctaaagaggcctagttcattgtttattaatgaattatcgaagatggagaacttttctgagaaagggtatggatctgttcctcgagcttacattgtgtgcaaagaggacaacattatctcggaagaccatcaacgatggatgatccataattatccggcgaatttagtgattgagatggaagagacggatcatatgccaatgttttgcaaacctcaagtactaagtgaccatctattggcaatcgctgacaatttctcttaaataatattttgatgaaaatgtatttggagtggatacaataaaaatgtgttctaaatgg

SEQ ID NO: 595 - protein, 263 aa, Arabidopsis thaliana
  REGION 35..257: note = Pfam Name: Abhydrolase_1 Pfam Description: alpha/beta hydrolase fold
  REGION 1..263: note = Ceres Clone ID no. 26006
  REGION 1..263: note = Bit score of 698.2 for HMM based on sequences of Figure 8
MSEEKRKQHFVLVHGACHGAWCWYKVKPLLEALGHRVTALDLAASGIDTTRSITDISTCEQYSEPLMQLMTSLPNDEKVVLVGHSFGGLSLALAMDKFPDKISVSVFVTAFMPDTKHSPSFVEEKFASSMTPEGWMGSELETYGSDNSGLSVFFSTDFMKHRLYQLSPVEDLELGLLLKRPSSLFINELSKMENFSEKGYGSVPRAYIVCKEDNIISEDHQRWMIHNYPANLVIEMEETDHMPMFCKPQVLSDHLLAIADNFS

SEQ ID NO: 596 - DNA, 1072 bp, Triticum aestivum
  misc_feature 1..1072: note = Ceres Clone ID no. 644331
  misc_feature 1..1072: note = Encodes the peptide sequence at SEQ ID NO. 597
  source 1..1072: mol_type = unassigned DNA
atcggagccacagctacagctcaagcacagaaaaacagccacaaaaccccacccatgcacatggaggcttgtgcgggccaagctagcagcgcgcacatcgtcctggtgcacggcgcatgcctcggcggctggtcctggttcaaggtggcgacgcggctcaggtcggccgggcaccgcgtcagcacgcctgacctcgcggcgtccggcgtcgaccccaggccgctgcgcgaggtgccgacgttccgcgactacaccaagccgctgctggacctcctggagtccctcccgtccggcgagaaggtggtgctcgtcggccacagcctcggcggcgtgaacgtcgccctcgcctgcgagctgtttccggagaagatcgccgctgcggtgttcgtcgccgccttcatgccggaccacaggtcgccgccgtcgtacgtccttgaaaagttcgtggaggggagaacgctggactggatggacacggagtttaagcctcaagatcctgaggggaagctgcctacttccatgctgttcgggccgctggtcactcgtgcaaagttcttccagttgtgttcgccggaggacctcacgctgggacgatccctgatgagggtcaactccatgttcgtggacgacctgaggctgcagccgccgcacaccgaggcccgctacgggtcggtgcgcaaggcgtacgtcgtcttcaaggacgaccacgccatcgtcgagcagttccagcggtggatggtgcacaactaccccgtggacgaggtgatggaaatcgatggcgcggaccacatggcgttgctctcgacgccgaccgagctggcgcgctgcctcgctgacatcgccgtcaagtatgctgcttgacttcctcgcaaaaaataaaagaaaagtctgctgcttgacgatggtgtggcgcacgttgcttgctgatctatacatctgtctaccttatggtttgtcccgttcgttaggtttcagagacttctactgcactctatttcagaccgataatgtttcaacatcgtatcgtggtgcatgtaactttgctatttaatatttgaagataaatgttggc

SEQ ID NO: 597 - protein, 266 aa, Triticum aestivum
  REGION 38..259: note = Pfam Name: Abhydrolase_1 Pfam Description: alpha/beta hydrolase fold
  REGION 1..266: note = Ceres Clone ID no. 644331
  REGION 1..266: note = Bit score of 483.0 for HMM based on sequences of Figure 8
  REGION 1..266: note = Functional Homolog Of SEQ ID NO. 595
MEACAGQASSAHIVLVHGACLGGWSWFKVATRLRSAGHRVSTPDLAASGVDPRPLREVPTFRDYTKPLLDLLESLPSGEKVVLVGHSLGGVNVALACELFPEKIAAAVFVAAFMPDHRSPPSYVLEKFVEGRTLDWMDTEFKPQDPEGKLPTSMLFGPLVTRAKFFQLCSPEDLTLGRSLMRVNSMFVDDLRLQPPHTEARYGSVRKAYVVFKDDHAIVEQFQRWMVHNYPVDEVMEIDGADHMALLSTPTELARCLADIAVKYAA

SEQ ID NO: 598 - protein, 263 aa, Arabidopsis thaliana
  REGION 34..257: note = Pfam Name: Abhydrolase_1 Pfam Description: alpha/beta hydrolase fold
  REGION 1..263: note = Public GI ID no. 15227859
  REGION 1..263: note = Bit score of 482.4 for HMM based on sequences of Figure 8
  REGION 1..263: note = Functional Homolog Of SEQ ID NO. 595
MEKNNKKRFVLVHGLCHGAWCWYKVKTHLEAVGHCVTAVDLAASGINMTRLEEIQTLKDYCKPLLELLNSLGSDDDKVILVAHSMGGIPAALASDIFPSKIATIVFLTAFMPDTRNLPAYVYQKLIRSVPQEGWLDTVFGTYGKHECPLEFALFGPKFMAKNLYQLSPVQDLELAKMLVRVNPIITNNLAGTRSFSEEGYGTVTRIYIVCGEDMAVPEDYQWWMIKNFPPKEVMEIKCADHMAMFSKPHKLCALLVEIACKYA

SEQ ID NO: 599 - DNA, 780 bp, Populus balsamifera
  misc_feature 1..780: note = Ceres Annot ID no. 1504349
  misc_feature 1..780: note = Encodes the peptide sequence at SEQ ID NO. 600
  source 1..780: mol_type = unassigned DNA; note = Populus balsamifera subsp. trichocarpa
atgggagaggtcaacaatcaaaaaaagcattttgttttgatccatggttcagttgcaggagcttggatatggtacaaggtcaagccaaggctagaggaagctggccaccgagtcacagctcttgacatggctgcatcaggggtgaacacaaaaacaattgaagaagttcgcactttcgatctgtataatgagcccttgatggagttcatggccaaattacctgaaaatgaaaaggttgtattggtggggcacagtttaggtggcttgaatctggcttttgctatggagaaattcccagagaaggtttctcttgctgtttttcttactgcaatcttgcctgataccgtgcaccagccatcttatatgttagaaaagtttgctgaaatcggtcccagggacgaagaatggcaagacactctgttttcattccatggaacccctgaagaaccgcatacatgtgttcatatgggttgcgagtttatgaagtgcaagccctttcatctttcctccgctgagatgctcttaaatagaccaggatcgatgtttgtggaaagcctgtccaaggcaaagaagttcactgatgagagatatggatcagtgccgcgagtttatattgtttgtactgaggatttaatgatgcttgcctcatttcagcgctggatgattgagcaaaatggggtaaaggaagtgatggagattcctgcagatcatatgccagttttttctacgcctacagaactctgccattctatactggagttggcacgcaagcatgcttag

SEQ ID NO: 600 - protein, 259 aa, Populus balsamifera
  REGION 36..122: note = Pfam Name: Abhydrolase_1 Pfam Description: alpha/beta hydrolase fold
  REGION 1..259: note = Ceres Annot ID no. 1504349
  REGION 1..259: note = Bit score of 517.3 for HMM based on sequences of Figure 8
  REGION 1..259: note = Functional Homolog Of SEQ ID NO. 595
  source 1..259: note = Populus balsamifera subsp. trichocarpa
MGEVNNQKKHFVLIHGSVAGAWIWYKVKPRLEEAGHRVTALDMAASGVNTKTIEEVRTFDLYNEPLMEFMAKLPENEKVVLVGHSLGGLNLAFAMEKFPEKVSLAVFLTAILPDTVHQPSYMLEKFAEIGPRDEEWQDTLFSFHGTPEEPHTCVHMGCEFMKCKPFHLSSAEMLLNRPGSMFVESLSKAKKFTDERYGSVPRVYIVCTEDLMMLASFQRWMIEQNGVKEVMEIPADHMPVFSTPTELCHSILELARKHA

SEQ ID NO: 601 - DNA, 867 bp, Arabidopsis thaliana
  misc_feature 1..867: note = Ceres Annot ID no. 1265088
  misc_feature 1..867: note = Encodes the peptide sequence at SEQ ID NO. 602
  source 1..867: mol_type = unassigned DNA
gaagaaaatgagtgaggaggagaggaagcaacacgtcgttctagtacatggtgcttgccatggcgcctggtgctggtacaaggttaagccgcagctcgaggcttctggccaccgcgtaaccgccgtagatctagctgcctccggtatagacatgaccaggtcaatcacagatatatccacatgcgaacaatactcagagccattgatgcagctaatgacctcactaccagatgatgagaaggttgtgcttgttggtcatagcttaggaggtttgagtttagctatggccatggatatgtttccgaccaaaatctctgtttctgtctttgtgactgctatgatgccagacaccaaacactcaccatccttcgtatgggataagctaagaaaagaaacttcacgagaggaatggttagacaccgtgtttacgagcgagaaacctgattttcctagcgagttttggatttttggaccagaattcatggccaagaacttgtatcagttgtctccagtccaagatcttgaattggcgaaaatgttggtgagggcaaacccattgattaagaaagatatggcagagagaagaagcttcagtgaggaaggatacggatccgttacacgtatatttattgtatgcggaaaggatcttgtgtcacccgaagattaccagcgatcgatgatcagcaactttcccccaaaagaagtaatggagatcaaagacgcagatcatatgccaatgttctccaagcctcaacaactatgtgctcttctcttggagattgcaaataaatatgcctaaataaatctgaaatatcatcatcactgcatatcaattacaaattcagtgtccaccacaataataagcca

SEQ ID NO: 602 - protein, 263 aa, Arabidopsis thaliana
  REGION 35..257: note = Pfam Name: Abhydrolase_1 Pfam Description: alpha/beta hydrolase fold
  REGION 1..263: note = Ceres Annot ID no. 1265088
  REGION 1..263: note = Bit score of 556.5 for HMM based on sequences of Figure 8
  REGION 1..263: note = Functional Homolog Of SEQ ID NO. 595
MSEEERKQHVVLVHGACHGAWCWYKVKPQLEASGHRVTAVDLAASGIDMTRSITDISTCEQYSEPLMQLMTSLPDDEKVVLVGHSLGGLSLAMAMDMFPTKISVSVFVTAMMPDTKHSPSFVWDKLRKETSREEWLDTVFTSEKPDFPSEFWIFGPEFMAKNLYQLSPVQDLELAKMLVRANPLIKKDMAERRSFSEEGYGSVTRIFIVCGKDLVSPEDYQRSMISNFPPKEVMEIKDADHMPMFSKPQQLCALLLEIANKYA

SEQ ID NO: 603 - protein, 250 aa, Arabidopsis thaliana
  REGION 31..244: note = Pfam Name: Abhydrolase_1 Pfam Description: alpha/beta hydrolase fold
  REGION 1..250: note = Bit score of 565.8 for HMM based on sequences of Figure 8
  REGION 1..250: note = Functional Homolog Of SEQ ID NO. 595
MMKQHFVLVHGSCLGAWCWYKVKPLLEASGHRVTALDLAACGIDTRSITDISTCEQYSEPLIQLMTSLPNDEKVVLVGHSYGGLTLAIAMDKFPDKISVSVFVTSFMPDTKNSPSFVLEKFASTMTPEDWMGSELEPYVVFSAEFTKHRILQLSPIEDLELRLLLKRPGSLFLNDLSRMKNFSEKGYGSVPRAYIVSKDDHTISEEYQRWMIDNYPPNLVIEMEGTDHLPLFCKPQLLSDHLLAIADKFS

SEQ ID NO: 604 - protein, 263 aa, Oryza sativa
  REGION 36..257: note = Pfam Name: Abhydrolase_1 Pfam Description: alpha/beta hydrolase fold
  REGION 1..263: note = Public GI ID no. 125527987
  REGION 1..263: note = Bit score of 481.1 for HMM based on sequences of Figure 8
  REGION 1..263: note = Functional Homolog Of SEQ ID NO. 595
  source 1..263: note = Oryza sativa subsp. indica
MADGKVACKHLVLVHGACIGGWTYFKVATRLRSAGYRVTAPDLGASGVDPRPLREVPTFRDYTAPLLGLLGSLPPGEKVVLVGHSLGGINVALAAELFPDKIAAAVFLCAFMPDHTSRPSHVLEKFIEGKWLDWMDTEFKPQDAEGKLPTSMLFGPQIAQERLMQLCSPEDVTLAGSLLRMSSMFVEDLQKQQPFTEGRYGSVRKVYVVVNQDLAIPEGFQRWMIGNSPVDEVKEIDAADHLVMLSRPDELARCLADIAESYA

SEQ ID NO: 605 - protein, 267 aa, Citrus sinensis
  REGION 37..261: note = Pfam Name: Abhydrolase_1 Pfam Description: alpha/beta hydrolase fold
  REGION 1..267: note = Public GI ID no. 14279437
  REGION 1..267: note = Bit score of 736.8 for HMM based on sequences of Figure 8
  REGION 1..267: note = Functional Homolog Of SEQ ID NO. 595
MEEVVGMEEKHFVLVHGVNHGAWCWYKLKARLVAGGHRVTAVDLAASGINMKRIEDVHTFHAYSEPLMEVLASLPAEEKVILVGHSLGGVTLALAGDKFPHKISVAVFVTAFMPDTTHRPSFVLEQYSEKMGKEDDSWLDTQFSQCDASNPSHISMLFGREFLTIKIYQLCPPEDLELAKMLVRPGSMFIDNLSKESKFSDEGYGSVKRVYLVCEEDIGLPKQFQHWMIQNYPVNEVMEIKGGDHMAMLSDPQKLCDCLSQISLKYA

SEQ ID NO: 606 - protein, 262 aa, Brassica napus
  REGION 35..256: note = Pfam Name: Abhydrolase_1 Pfam Description: alpha/beta hydrolase fold
  REGION 1..262: note = Bit score of 650.2 for HMM based on sequences of Figure 8
  REGION 1..262: note = Functional Homolog Of SEQ ID NO. 595
MSENKRKQHFVLVHGSCHGAWCWYKVKPLLEAAGHQVTALNLAASGIDTRSITDISTCEQYSEPLLNLLKSLPDDEKVVLVGHSFGGLSLAIAMDKFPDKISVSVFLSAFMPDTKHSPSFVLEKFGSSMAHEAWMGTEFKPYGSDNSGLSMFFSFEFMKLGLYQLSPVEDLELGLLLKRPGSLFVSNLSKMKNFSDEGYGNVPRAYIVCKEDKGIPEAFQRWLIDNFPVNIVMEIDETDHMPMFCKPQQLCDHFMEIADKFV

SEQ ID NO: 607 - DNA, 953 bp, Brassica napus
  misc_feature 1..953: note = Ceres Clone ID no. 1065042
  misc_feature 1..953: note = Encodes the peptide sequence at SEQ ID NO. 608
  source 1..953: mol_type = unassigned DNA
aggaaataatatacaaaatcaaaggttaagaaaaaaaatgggtgaggagaagaatcagcagcacttcgtgctagtacatggtgcatgccacggcgcgtggtgctggaacaaggttaagccgcttctcgaggcctccggccaccgcgtaaccgccttagacctagctgcttcgggtatagacacaaccaggtctatcactgagatctccacatgcgaacaatactctgagccattgatacagctaatcgcctcattaccaagtgatgagaaggttgtgctcgttggtcatagctttggagggttcagcttagccatggccatggataagtttccagacaaaatctctgtctcagtcttcgtgactgctttcatgcccgataccaaacactcaccatcgttcgtcgtggataagtttaaacgggatacgccaccagaagcatggttgggctcggagttcaaatcatatggctcagacaattccggtgtgtcaatgtctttcagcactgagttcatgaagcacgctctctatcaactttctcctgttgaggatattgagcttggattgcttttaaagaggcccggatcattgttcatcaacgatttatccaaggtggagaacttttcggacaaagggtatggatctgttcctcgagcttacattgtgtgcaaagaggacaaaacaattacaaaagaaattcagtggtggatgatcgataattatccgacgaaagtagtgaaggagatggaggacacagatcatatgccaatgttctgcaagcctcagttactaagtgactatctcttggaaatcgcggaaaaattagcttaaattatcttgttatgaaaatgtatttggatacaaataagtgttgtcctgcaaatgggtctttctaaagatcaagacttttatcgcgttcaaatgtttgacataatttaaaataaacttaacagtc

SEQ ID NO: 608 - protein, 263 aa, Brassica napus
  REGION 35..257: note = Pfam Name: Abhydrolase_1 Pfam Description: alpha/beta hydrolase fold
  REGION 1..263: note = Ceres Clone ID no. 1065042
  REGION 1..263: note = Bit score of 641.8 for HMM based on sequences of Figure 8
  REGION 1..263: note = Functional Homolog Of SEQ ID NO. 595
MGEEKNQQHFVLVHGACHGAWCWNKVKPLLEASGHRVTALDLAASGIDTTRSITEISTCEQYSEPLIQLIASLPSDEKVVLVGHSFGGFSLAMAMDKFPDKISVSVFVTAFMPDTKHSPSFVVDKFKRDTPPEAWLGSEFKSYGSDNSGVSMSFSTEFMKHALYQLSPVEDIELGLLLKRPGSLFINDLSKVENFSDKGYGSVPRAYIVCKEDKTITKEIQWWMIDNYPTKVVKEMEDTDHMPMFCKPQLLSDYLLEIAEKLA

SEQ ID NO: 609 - protein, 265 aa, Vitis vinifera
  REGION 36..259: note = Pfam Name: Abhydrolase_1 Pfam Description: alpha/beta hydrolase fold
  REGION 1..265: note = Public GI ID no. 157329790
  REGION 1..265: note = Bit score of 751.6 for HMM based on sequences of Figure 8
  REGION 1..265: note = Functional Homolog Of SEQ ID NO. 595
MEVDRKQGRHFVLVHGACHGAWTWYKVKPRLEAAGHRVTALDMAASGINRKQIQEVHSMHEYSQPLLEMMAALPPNEKVILVGHSLGGLNLAVAMEKFPEKVSVAVFLTAFMPDTLHRPSYVLDQYVERTPNDAWLDTQFSPYGSSEKPQNSMFFGPEFISTKLYQLSPIEDLELVLALARPASLFLEDLAELKKFSNEGYGSVTSVFIRCDKDEGIRKEFQQWMIENSGGVKEVMNIKDADHMAMFSKPEELCACLLEVAHKYG

SEQ ID NO: 610 - protein, 272 aa, Arabidopsis thaliana
  REGION 53..266: note = Pfam Name: Abhydrolase_1 Pfam Description: alpha/beta hydrolase fold
  REGION 1..272: note = Public GI ID no. 15227861
  REGION 1..272: note = Bit score of 566.2 for HMM based on sequences of Figure 8
  REGION 1..272: note = Functional Homolog Of SEQ ID NO. 595
MYENGISFIISLLICGCVKSEEMMKQHFVLVHGSCLGAWCWYKVKPLLEASGHRVTALDLAACGIDTRSITDISTCEQYSEPLIQLMTSLPNDEKVVLVGHSYGGLTLAIAMDKFPDKISVSVFVTSFMPDTKNSPSFVLEKFASTMTPEDWMGSELEPYVVFSAEFTKHRILQLSPIEDLELRLLLKRPGSLFLNDLSRMKNFSEKGYGSVPRAYIVSKDDHTISEEYQRWMIDNYPPNLVIEMEGTDHLPLFCKPQLLSDHLLAIADKFS

SEQ ID NO: 611 - protein, 259 aa, Gentiana triflora
  REGION 32..253: note = Pfam Name: Abhydrolase_1 Pfam Description: alpha/beta hydrolase fold
  REGION 1..259: note = Public GI ID no. 146272407
  REGION 1..259: note = Bit score of 686.5 for HMM based on sequences of Figure 8
  REGION 1..259: note = Functional Homolog Of SEQ ID NO. 595
  source 1..259: note = Gentiana triflora var. japonica
MSPTKHFVAVHGVGHGAWVYYKLKPRIEAAGFKFTAIDLAAAGVNPKKLEEVNSLEEYCGPLFDVLAAVPEGEKVILVGHSGGGLSAAVGMEKFPKKISVAVFLNAIMPDTKNRPSYVMEEYTARTPIEAWKDTQFSAYGEPPITALLCGPEFISTSLYHLSPVEDHTLGKLLVRPGALFVEDLLKGAVKFTDEGFGSVPRVYVVATEDKTIPPEFQRWMIENNPVAEVKEIEGADHLPQFSKPDELTQVLVDIAKNHG

SEQ ID NO: 612 - DNA, 909 bp, Arabidopsis thaliana
  misc_feature 1..909: note = Ceres Clone ID no. 95094
  misc_feature 1..909: note = Encodes the peptide sequence at SEQ ID NO. 613
  source 1..909: mol_type = unassigned DNA
aactttataacgctattctcaaacaagcaaagaaccttaaccaaaaagaaaacgtctacggagacatatggagaggaaacatcacttcgtgttagttcacaacgcttatcatggagcctggatctggtacaagctcaagcccctccttgaatcagccggccaccgcgttactgctgtcgaactcgccgcctccgggatcgacccacgaccaatccaggccgttgaaaccgtcgacgaatactccaaaccgttgatcgaaaccctcaaatctcttccagagaacgaagaggtaattctggttggattcagcttcggaggcatcaacatcgctctcgccgccgacatatttccggcgaagattaaggttcttgtgttcctcaacgccttcttgcccgacacaacccacgtgccttctcacgttctggacaagtatatggagatgcctggaggtttgggagattgtgagttttcatctcatgaaacaagaaatgggacgatgagtttattgaagatgggaccaaaattcatgaaggcacgtctttaccaaaattgtcccatagaggattacgagctggcaaaaatgttgcataggcaagggtcatttttcacagaggatctatcaaagaaagaaaagtttagcgaggaaggatatggttcggtgcaacgagtttacgtaatgagtagtgaagacaaagccatcccctgcgatttcattcgttggatgattgataatttcaacgtctcgaaagtctacgagatcgatggcggagatcacatggtgatgctctccaaaccccaaaaactctttgactctctctctgctattgccaccgattatatgtaataatcttaaagtctgttttacttttttctcatcgttactaataaaacaaacccctttttccgggc

SEQ ID NO: 613 - protein, 258 aa, Arabidopsis thaliana
  REGION 32..252: note = Pfam Name: Abhydrolase_1 Pfam Description: alpha/beta hydrolase fold
  REGION 1..258: note = Ceres Clone ID no. 95094
  REGION 1..258: note = Bit score of 495.0 for HMM based on sequences of Figure 8
  REGION 1..258: note = Functional Homolog Of SEQ ID NO. 595
MERKHHFVLVHNAYHGAWIWYKLKPLLESAGHRVTAVELAASGIDPRPIQAVETVDEYSKPLIETLKSLPENEEVILVGFSFGGINIALAADIFPAKIKVLVFLNAFLPDTTHVPSHVLDKYMEMPGGLGDCEFSSHETRNGTMSLLKMGPKFMKARLYQNCPIEDYELAKMLHRQGSFFTEDLSKKEKFSEEGYGSVQRVYVMSSEDKAIPCDFIRWMIDNFNVSKVYEIDGGDHMVMLSKPQKLFDSLSAIATDYM

SEQ ID NO: 614 - DNA, 985 bp, Musa acuminata
  misc_feature 1..985: note = Ceres Clone ID no. 1714893
  misc_feature 1..985: note = Encodes the peptide sequence at SEQ ID NO. 615
  source 1..985: mol_type = unassigned DNA
acttgccatagcacctccaaatgaattatggagaaggaaggggcgacgggagctgcaacaagaagcacataattctcgtccatggcgcttgccatggagcatggtcttggcacaaggtgacgacccagttgaggtccgctgggtaccaggttacggtgcccgacctcgcggcctccggcgtcgacgagcggcggttccaggacctgcgatcgttcatccactactcccagccgctcctggacatattggcctgcctccctcctggtgagagggtcattctggtaggccacagcctcggaggcctcaacatagctttggctatggacaggttccctgagaagatcgccgccgccgtcttcgtcaccgccttgatgccggattcagtcaacccgccctcctacgtcatggacaagcttaaaaaggaaaaaaccatgttattttggagcgacacacaatttggcttggtcggggacgaagataaaggtcccgtttccctgctattcggccccaaatttttatccaagctttacacgcgtagcccacccgaggatctgacgctggcgaggaccctcatgaggccttcttccttcttccttgaagacctcgggtccatgcctcccttctccgagtcgggttacggatcggtggagaagatctacgtcgtgtgcgctcaggatgagatcctcacggaaggttttcagcgctggatgatcgagaacaacccagtgaaagaggtgagagagctggaggacgctgaccatatgcccatgttctcaaccccgaagcagctgtttcagtgcctctcggatgttgccgatgcctgtgcttgatcctcccgggttttactattacaagccaccaaatactgtggccatagtaaataagatagttgttcgtgcgttgctgctgtgatcgatgcatcatggtttgctatcagcaacggtgtatttgtttcagttatcaaatcatggacagctgagaagac

SEQ ID NO: 615 - protein, 269 aa, Musa acuminata
  REGION 42..263: note = Pfam Name: Abhydrolase_1 Pfam Description: alpha/beta hydrolase fold
  REGION 1..269: note = Ceres Clone ID no. 1714893
  REGION 1..269: note = Bit score of 688.3 for HMM based on sequences of Figure 8
  REGION 1..269: note = Functional Homolog Of SEQ ID NO. 595
MNYGEGRGDGSCNKKHIILVHGACHGAWSWHKVTTQLRSAGYQVTVPDLAASGVDERRFQDLRSFIHYSQPLLDILACLPPGERVILVGHSLGGLNIALAMDRFPEKIAAAVFVTALMPDSVNPPSYVMDKLKKEKTMLFWSDTQFGLVGDEDKGPVSLLFGPKFLSKLYTRSPPEDLTLARTLMRPSSFFLEDLGSMPPFSESGYGSVEKIYVVCAQDEILTEGFQRWMIENNPVKEVRELEDADHMPMFSTPKQLFQCLSDVADACA

SEQ ID NO: 616 - protein, 265 aa, Vitis vinifera
  REGION 36..259: note = Pfam Name: Abhydrolase_1 Pfam Description: alpha/beta hydrolase fold
  REGION 1..265: note = Public GI ID no. 157329890
  REGION 1..265: note = Bit score of 755.1 for HMM based on sequences of Figure 8
  REGION 1..265: note = Functional Homolog Of SEQ ID NO. 595
MEVDRKQGRHFVLVHGACHGAWSWYKVKPRLEAAGHRVTALDMAASGINRKQIQEVHSMHEYSQPLLEMMATLPPNEKVILVGHSLGGLNLAVAMEKFPEKVSVAVFLTAFMPDTLHRPSYVLDQYVERTPNDAWLDTQFSPYGSSEKPQNSMFFGPEFISTKLYQLSPIEDLELVLALARPASLFLEDLAELKKFSNEGYGSVTSVFIRCDKDEAIRKEFQQWMIENSGGVKEVMNIKDADHMAMFSKPEELCACLLEVAHKYG

SEQ ID NO: 617 - DNA, 913 bp, Arabidopsis thaliana
  misc_feature 1..913: note = Ceres Annot ID no. 859635
  misc_feature 1..913: note = Encodes the peptide sequence at SEQ ID NO. 618
  source 1..913: mol_type = unassigned DNA
gtgtgacttttaggagagtaagaaaatatcgaaggtcagaagaatgagtgaggaaaagaggaaacaacattttgtactagtacatggttcgtgccatggcgcgtggtgctggtacaaggttaagccgctgctagaggcggtgggccaccgcgtaactgctgtggacttagctgcctccggaatagacacaacgaggtcgatcactgacatccccacatgcgaacaatactcggagccattgacgaagctcctgacctcattgccaaatgatgaaaaggttgtgctcgttggtcacagctttggtggcttgaacttagccatagccatggaaaagtttcccgaaaaaatctctgtcgctgtattcttgactgctttcatgccggacaccgaacactcaccatccttcgtcttggacaagtttggaagcaacatgcctcaagaagcatggatgggcaccgaattcgaaccttatggttcagacaattccggactgagtatgttttttagccctgacttcatgaagttgggtctctaccagctttctccagttgaggatcttgaactgggattacttttaatgaggccaggatcgttatttattaacgatttatcgaagatgaaaaacttctcggatgaaggatatgggtctgttcctcgagttttcatagtgtgtaaagaggacaaagcaattccagaagaacgccagagatggatgattgataattttccggtgaatttagtgatggagatggaggagacagatcatatgccaatgttctgcaagcctcagcaactcagtgattacttcctgaaaatcgcggacaaattcgtttaatcaaatcttcatgaaactgtattggatttgatataataaaggtttgttgcaaatgaattaataatgatgaatattttt

SEQ ID NO: 618 - protein, 263 aa, Arabidopsis thaliana
  REGION 35..257: note = Pfam Name: Abhydrolase_1 Pfam Description: alpha/beta hydrolase fold
  REGION 1..263: note = Ceres Annot ID no. 859635
  REGION 1..263: note = Bit score of 673.2 for HMM based on sequences of Figure 8
  REGION 1..263: note = Functional Homolog Of SEQ ID NO. 595
MSEEKRKQHFVLVHGSCHGAWCWYKVKPLLEAVGHRVTAVDLAASGIDTTRSITDIPTCEQYSEPLTKLLTSLPNDEKVVLVGHSFGGLNLAIAMEKFPEKISVAVFLTAFMPDTEHSPSFVLDKFGSNMPQEAWMGTEFEPYGSDNSGLSMFFSPDFMKLGLYQLSPVEDLELGLLLMRPGSLFINDLSKMKNFSDEGYGSVPRVFIVCKEDKAIPEERQRWMIDNFPVNLVMEMEETDHMPMFCKPQQLSDYFLKIADKFV

SEQ ID NO: 619 - protein, 263 aa, Oryza sativa
  REGION 36..257: note = Pfam Name: Abhydrolase_1 Pfam Description: alpha/beta hydrolase fold
  REGION 1..263: note = Public GI ID no. 115440397
  REGION 1..263: note = Bit score of 481.7 for HMM based on sequences of Figure 8
  REGION 1..263: note = Functional Homolog Of SEQ ID NO. 595
  source 1..263: note = Oryza sativa subsp. japonica
MADGKVACKHLVLVHGACIGGWTYFKVATRLRSAGYRVTAPDLGASGVDPRPLREVPTFRDYTAPLLGLLGSLPPGEKVVLVGHSLGGINVALAAELFPDKIAAAVFLCAFMPDHTSRPSHVLEKFIEGKWLDWMDTEFKPQDAEGKLPTSMLFGPQIAQERLMQLCSPEDVTLAGSLLRVSSMFVEDLQKQQPFTEGRYGSVRKVYVVVNQDLAIPEGFQRWMIGNSPVDEVKEIDAADHLVMLSRPDELARCLADIAESYA

SEQ ID NO: 620 - protein, 260 aa, Nicotiana tabacum
  REGION 32..254: note = Pfam Name: Abhydrolase_1 Pfam Description: alpha/beta hydrolase fold
  REGION 1..260: note = Public GI ID no. 40549303
  REGION 1..260: note = Bit score of 747.1 for HMM based on sequences of Figure 8
  REGION 1..260: note = Functional Homolog Of SEQ ID NO. 595
MKEGKHFVLVHGACHGGWSWYKLKPLLEAAGHKVTALDLAASGTDLRKIEELRTLYDYTLPLMELMESLSADEKVILVGHSLGGMNLGLAMEKYPQKIYAAVFLAAFMPDSVHNSSFVLEQYNERTPAENWLDTQFLPYGSPEEPLTSMFFGPKFLAHKLYQLCSPEDLALASSLVRPSSLFMEDLSKAKYFTDERFGSVKRVYIVCTEDKGIPEEFQRWQIDNIGVTEAIEIKGADHMAMLCEPQKLCASLLEIAHKYN

SEQ ID NO: 621 - DNA, 792 bp, Populus balsamifera
  misc_feature 1..792: note = Ceres Annot ID no. 1457048
  misc_feature 1..792: note = Encodes the peptide sequence at SEQ ID NO. 622
  source 1..792: mol_type = unassigned DNA; note = Populus balsamifera subsp. trichocarpa
atggtagagaccaagaatcagaagcattttgttctagtacatggagcttgccatggggcttggtgctggcaaaagttcaaaacgctgcttgagtcagcaagtaacagggtcacggtgcttgaccttgctgcttcaggcgccaacatgaaggcaatccaagatgtagaaacacttgatgaatatacggagcctttgttagagtttctggcctcattacaaccgaaggagaaggtcattctagtagggcacagcctaggaggtttgagtttggctcttgctatggaaaagttcccagagaagattgctgttgctgttttcttatcagctttcatgccagataccacacacaagccatcatttgtcttggatcagtataacgagaggaccccggcggattcctggttggacactcaatttttaccatacagcagttctcaaagtcatctcacaacaatgtcttttggacccaaattcttatcctccaagctctatcagctaagcccacctgaggatcttgagcaagcaaagactatggtaaggccaggatcactgtttctgtatgatttgtcaaaggcaaacagtttctccacgacgggctatgggtcagtcaaacgagtgtatgttatctgcgatgaagatttagcgataccagaagagtttcaacgctggatgattgaaaacagtgctgttgaagaagttatggaaattgaaggtgcagaccatatggttatgttcagcaagccacaagaactcttccattgtctctcagagatagcaaataaacatgcttaa

SEQ ID NO: 622 - protein, 263 aa, Populus balsamifera
  REGION 35..257: note = Pfam Name: Abhydrolase_1 Pfam Description: alpha/beta hydrolase fold
  REGION 1..263: note = Ceres Annot ID no. 1457048
  REGION 1..263: note = Bit score of 751.8 for HMM based on sequences of Figure 8
  REGION 1..263: note = Functional Homolog Of SEQ ID NO. 595
  source 1..263: note = Populus balsamifera subsp. trichocarpa
MVETKNQKHFVLVHGACHGAWCWQKFKTLLESASNRVTVLDLAASGANMKAIQDVETLDEYTEPLLEFLASLQPKEKVILVGHSLGGLSLALAMEKFPEKIAVAVFLSAFMPDTTHKPSFVLDQYNERTPADSWLDTQFLPYSSSQSHLTTMSFGPKFLSSKLYQLSPPEDLEQAKTMVRPGSLFLYDLSKANSFSTTGYGSVKRVYVICDEDLAIPEEFQRWMIENSAVEEVMEIEGADHMVMFSKPQELFHCLSEIANKHA

SEQ ID NO: 623 - protein, 264 aa, Rauvolfia serpentina
  REGION 38..260: note = Pfam Name: Abhydrolase_1 Pfam Description: alpha/beta hydrolase fold
  REGION 1..264: note = Public GI ID no. 50401192
  REGION 1..264: note = Bit score of 698.1 for HMM based on sequences of Figure 8
  REGION 1..264: note = Functional Homolog Of SEQ ID NO. 595
MHSAANAKQQKHFVLVHGGCLGAWIWYKLKPLLESAGHKVTAVDLSAAGINPRRLDEIHTFRDYSEPLMEVMASIPPDEKVVLLGHSFGGMSLGLAMETYPEKISVAVFMSAMMPDPNHSLTYPFEKYNEKCPADMMLDSQFSTYGNPENPGMSMILGPQFMALKMFQNCSVEDLELAKMLTRPGSLFFQDLAKAKKFSTERYGSVKRAYIFCNEDKSFPVEFQKWFVESVGADKVKEIKEADHMGMLSQPREVCKCLLDISDS

SEQ ID NO: 624 - DNA, 795 bp, Populus balsamifera
  misc_feature 1..795: note = Ceres Annot ID no. 1451281
  misc_feature 1..795: note = Encodes the peptide sequence at SEQ ID NO. 625
  source 1..795: mol_type = unassigned DNA; note = Populus balsamifera subsp. trichocarpa
atgggagaggtcaacaatcaaaaacagcattttgttttgatccatggttcagttgcaggagcttggatatggtacaaggtcaagccaaggctagaggaagctggccaccgtgtcacagctcttgacatggctgcatcaggggtgaacacacaaaaaattgaagaagttcgcacttttgatcagtataatgagcccttgatggagttcatggccaaattacctgaaaatgaaaaggttgtattggtggggcacagtttaggtggcttgaatctggcttttgctatggagaaattcccagagaaggtttctcttgctgtttttcttactgcaatcttgcctgatacggtgcaccagccatcttatatgttagaaaagtttgctgaaatcggtcccaagggagaagagtggcaagacactctgttttcattccatggaacccctgaagaaccgcatacatgtgttcacatgggatgcgagtttatgaagtgcaagccctttcatctttcctccgctgaggatctagctctgcagatgctcttaaatagaccaggatcgatgtttgtggaaagcctgtccaaggcaaagaagttcactgatgagagatatggatcagtgccgcgagtttatattgtttgtactgaggatttaatgatgcctgcctcatttcagcgctggatgattgagcaaaatggggtaaaggaagtgatggagattcctgcagatcatatgccagttttttctacgcctacagaactctgccattctatactggagttggcacgcaagcatgcttag

SEQ ID NO: 625 - protein, 264 aa, Populus balsamifera
  REGION 36..258: note = Pfam Name: Abhydrolase_1 Pfam Description: alpha/beta hydrolase fold
  REGION 1..264: note = Ceres Annot ID no. 1451281
  REGION 1..264: note = Bit score of 547.1 for HMM based on sequences of Figure 8
  REGION 1..264: note = Functional Homolog Of SEQ ID NO. 595
  source 1..264: note = Populus balsamifera subsp. trichocarpa
MGEVNNQKQHFVLIHGSVAGAWIWYKVKPRLEEAGHRVTALDMAASGVNTQKIEEVRTFDQYNEPLMEFMAKLPENEKVVLVGHSLGGLNLAFAMEKFPEKVSLAVFLTAILPDTVHQPSYMLEKFAEIGPKGEEWQDTLFSFHGTPEEPHTCVHMGCEFMKCKPFHLSSAEDLALQMLLNRPGSMFVESLSKAKKFTDERYGSVPRVYIVCTEDLMMPASFQRWMIEQNGVKEVMEIPADHMPVFSTPTELCHSILELARKHA

SEQ ID NO: 626 - DNA, 792 bp, Populus balsamifera
  misc_feature 1..792: note = Ceres Annot ID no. 1510252
  misc_feature 1..792: note = Encodes the peptide sequence at SEQ ID NO. 627
  source 1..792: mol_type = unassigned DNA; note = Populus balsamifera subsp. trichocarpa
atggtagagaccaagaatcaggagcattttgttctagtacatggagcttgccatggggcttggtgctggcaaaagttcaaaacgctgcttgagtcagcaagtaacagggtcacggtgcttgaccttgctgcttcaggcgccaacatgaaggcaatccaagatgtagaaacacttgatgaatatacggagcctttgttagagtttctggcctcattacaaccgaaggagaaggtcattctagtagggcacagcctaggaggtttgagtttggctcttgctatggaaaagttcccagagaagattgctgttgctgttttcttatcagctttcatgccagataccacacacaagccatcatttgtcttggatcagtataacgagaggaccccggcggattcctggttggacactcaatttttaccatacagcagttctcaaagtcatctcacaacaatgtcttttggacccaaattcttatcctccaagctctatcagctaagcccacctgaggatcttgagcaagcaaaaactttggtaaggccaggatcaatgtttctggatgatttgtcaaaggcaaacagtttctccacgacgggctatgggtcagtcaaacgagtatatgttatctttgacaaagatttagcgataccagtagagtttcaacgctggatgattgaaaacagtgctgttgaagaagttatggaaattgaaggtgcagaccatatggttatgttcagcaagccacaagaactcttccattgtctctcagagatagcaaataaacatgcttaa

SEQ ID NO: 627 - protein, 263 aa, Populus balsamifera
  REGION 35..257: note = Pfam Name: Abhydrolase_1 Pfam Description: alpha/beta hydrolase fold
  REGION 1..263: note = Ceres Annot ID no. 1510252
  REGION 1..263: note = Bit score of 731.8 for HMM based on sequences of Figure 8
  REGION 1..263: note = Functional Homolog Of SEQ ID NO. 595
  source 1..263: note = Populus balsamifera subsp. trichocarpa
MVETKNQEHFVLVHGACHGAWCWQKFKTLLESASNRVTVLDLAASGANMKAIQDVETLDEYTEPLLEFLASLQPKEKVILVGHSLGGLSLALAMEKFPEKIAVAVFLSAFMPDTTHKPSFVLDQYNERTPADSWLDTQFLPYSSSQSHLTTMSFGPKFLSSKLYQLSPPEDLEQAKTLVRPGSMFLDDLSKANSFSTTGYGSVKRVYVIFDKDLAIPVEFQRWMIENSAVEEVMEIEGADHMVMFSKPQELFHCLSEIANKHA

SEQ ID NO: 628 - DNA, 1062 bp, Panicum virgatum
  misc_feature 1..1062: note = Ceres Clone ID no. 1822691
  misc_feature 1..1062: note = Encodes the peptide sequence at SEQ ID NO. 629
  source 1..1062: mol_type = unassigned DNA
gcgccgagacgtggctgcaggcgcacgagaggtgatcgagcattcgagccgacgcgcgcgcagcaagcagcaccgtacccgagtttctcgccatgggcggcagcaagcacatcgtgctcgtccacggcgcgtgcctcggcggctggtcctggttcaaggtggccacccggctccgcgccgcggggtaccgcgtggacgcgccggacctggcggcgtcgggcgtggacccgcggccgctccgcgaggtgcccacgttccgggactacacggcgccgctgctggacctcctcgcggcgctcccggccggggaccgcgtggtgctcgtcggccacagcctcggcggcctgagcgtcgccctggccgccgagctgttcccggacaaggtcgccgccgccgtgttcctctgcgccttcatgcccgactgcgccgcgcggccgtcgcacgtgctcgagaagttcgtggaggggaagtggctggactggatggacacggagatgaagccgcaggacgcggagggcaagctccccacgtccatgatgttcgggccccggatcctgcgggagaagttctaccagctctgctcgcccgaggacatcaccctggcgtcgtccctgatgcgggtgagctcgatgttcgtggaggacctggccgcccagcagccgttcaccgcgggcgggtacggctcggtgcgcagggtgtacgtggtgtgctcggaggactacggcatcgtggaggggttccagagctggatggtggagaacaacccggtggaggaggtgagggagatcgccgccgaccacctggtgatgctctccaggcccgacgagctggcgcggtgcctcgccgacatcgccgacaagtacgcgtgatgaatgatgatgatgaggaagatcgatgctcgatagatctgccgctgcgtggatgcatggtgttctgttgtgatcagctttcttttctttcttaatcaaaaaagaaaccttggagaactcgagcctgttgtttcgaaatgagattgaagttcacggtgtggcgagcaattgaccaatcgtggatgtttattag

SEQ ID NO: 629 - protein, 258 aa, Panicum virgatum
  REGION 32..252: note = Pfam Name: Abhydrolase_1 Pfam Description: alpha/beta hydrolase fold
  REGION 1..258: note = Ceres Clone ID no. 1822691
  REGION 1..258: note = Bit score of 489.6 for HMM based on sequences of Figure 8
  REGION 1..258: note = Functional Homolog Of SEQ ID NO. 595
MGGSKHIVLVHGACLGGWSWFKVATRLRAAGYRVDAPDLAASGVDPRPLREVPTFRDYTAPLLDLLAALPAGDRVVLVGHSLGGLSVALAAELFPDKVAAAVFLCAFMPDCAARPSHVLEKFVEGKWLDWMDTEMKPQDAEGKLPTSMMFGPRILREKFYQLCSPEDITLASSLMRVSSMFVEDLAAQQPFTAGGYGSVRRVYVVCSEDYGIVEGFQSWMVENNPVEEVREIAADHLVMLSRPDELARCLADIADKYA

SEQ ID NO: 630 - protein, 259 aa, Rheum australe
  REGION 31..253: note = Pfam Name: Abhydrolase_1 Pfam Description: alpha/beta hydrolase fold
  REGION 1..259: note = Public GI ID no. 197312921
  REGION 1..259: note = Bit score of 688.8 for HMM based on sequences of Figure 8
  REGION 1..259: note = Functional Homolog Of SEQ ID NO. 595
MQSKHYMVVHGMSHGAWCWYKLKPLLESAGHRVTALDMGASGVNMRPVEELRSFRDYNAPLLSFMSSLPEDDKVVLVGHSLGGINIAFAMEEFPEKVSAAVFVAALVPDTVNKPSFFLDELFKKIGAANGWLDCQFSTFGSPDEPVTVISFGPKFLSLLYDSSPIEDYELAKMLTRPLPNYVTDLGKAEKLSDGKYGSVRRVYVICKEDKAIPDELVGQMIEWNGLKEVIELQGADHMPMLSNPQQLCDCLVQIAVENP

SEQ ID NO: 631 - DNA, 795 bp, Solanum lycopersicum
  misc_feature 1..795: note = Ceres Annot ID no. 8456439
  misc_feature 1..795: note = Encodes the peptide sequence at SEQ ID NO. 632
  source 1..795: mol_type = unassigned DNA
atggaagctaacaagaaacaaggaaaacattttgttctagtacatggtgcaggccatggagcttggtgttggtacaagctaaaaccattgctagaggctgcaggccacaaggtcactgctcttgacttagcagcctctggcattgatttgagaaaaatagagcaacttcacacacttcatgattacactttgccattattggaattaatggaatctcttccacaagaggagaaagccatattagttggacatagtcttggtggtatgaatttagcacttgctatggaaaaatacccaaaaaagatctatgctgctgttttcttggctgcttttatgcctgattctattcacatatcttcctatgttatggatcagtacaatgaacggacaccagcagagaattggttagatactcaatttttaccatatggtacccctgaagagccactcacatccatgacttttggtcccaaatttttggctgataagctttaccggttaagccctcctgaggatgttgcattaggattatcattagtgagaacaagttctctgtttctggaagatttgtcaaaggccaagtatttgacagatgaaggatatggatctgtgaagagagtttatgtagtgtgtacagaggataaaggcatatcaaaagaatttcaacaatggcaaattgataatattggtgttactgaagcaaaggaaattaaaggtgctgatcatatggcaatgctatgtatgcccaaaaaactttgtgacactctcgtggagattgcagataaatacaattga

SEQ ID NO: 632 - protein, 264 aa, Solanum lycopersicum
  REGION 36..258: note = Pfam Name: Abhydrolase_1 Pfam Description: alpha/beta hydrolase fold
  REGION 1..264: note = Ceres Annot ID no. 8456439
  REGION 1..264: note = Bit score of 748.2 for HMM based on sequences of Figure 8
  REGION 1..264: note = Functional Homolog Of SEQ ID NO. 595
MEANKKQGKHFVLVHGAGHGAWCWYKLKPLLEAAGHKVTALDLAASGIDLRKIEQLHTLHDYTLPLLELMESLPQEEKAILVGHSLGGMNLALAMEKYPKKIYAAVFLAAFMPDSIHISSYVMDQYNERTPAENWLDTQFLPYGTPEEPLTSMTFGPKFLADKLYRLSPPEDVALGLSLVRTSSLFLEDLSKAKYLTDEGYGSVKRVYVVCTEDKGISKEFQQWQIDNIGVTEAKEIKGADHMAMLCMPKKLCDTLVEIADKYN

SEQ ID NO: 633 - protein, 260 aa, Brassica rapa
  REGION 35..257: note = Pfam Name: Abhydrolase_1 Pfam Description: alpha/beta hydrolase fold
  REGION 1..260: note = Bit score of 632.2 for HMM based on sequences of Figure 8
  REGION 1..260: note = Functional Homolog Of SEQ ID NO. 595
MGEEKKQQHFVLVHGACHGAWCWYKVKPLLEASGHRVTALDLAASGIDTTRSITEISTCEQYSEPLIQLIASLPSDEKVVLVGHSFGGFSLTMAMDKFPDKISVSVFVTAFMPDTKHSPSFVVDKFKRETPPEAWLGSELKPYGSDNSGVSMSFSTEFMKHALYQLSPVEDIELGLLLKRPGSLFINDLSKVENFSDKGYGSVPRAYIVCKEDKTLTKEIQWWMIDNFPTKLVKEMEDTDHMPMFCKPQLLSDYLSEIAE

SEQ ID NO: 634 - protein, 258 aa, Arabidopsis thaliana
  REGION 32..252: note = Pfam Name: Abhydrolase_1 Pfam Description: alpha/beta hydrolase fold
  REGION 1..258: note = Public GI ID no. 15028131
  REGION 1..258: note = Bit score of 489.9 for HMM based on sequences of Figure 8
  REGION 1..258: note = Functional Homolog Of SEQ ID NO. 595
MERKHHFVLVHNAYHGAWIWYKLKPLLESAGHRVTAVELAASGIDPRPIQAVETVDEYSKPLIETLKSLPENEEVILVGFSFGGINIALAADIFPAKIKVLVFLNAFLPDTTHVPSHVLDKYMEMPGGLGDCEFSSHETRNGTMSLLKMGPKFMKARLYQNCPIEDYELAKMLHRQRSFFTEDLSKKEKFSEEGYGSVQRVYVMSSEDKAIPCDFIRWMIDNFNVSKVYEIDGGDHMVMLSKPQKLFDSLSAIATDYM

SEQ ID NO: 635 - DNA, 875 bp, Arabidopsis thaliana
  misc_feature 1..875: note = Ceres Clone ID no. 270875
  misc_feature 1..875: note = Encodes the peptide sequence at SEQ ID NO. 636
  source 1..875: mol_type = unassigned DNA
acatcacataccaaaaaaaggcaaaacactcacgaaagaagaaacggagaggatgaagcattatgtgctagttcacggaggctgccacggtgcgtggtgttggtacaaggtgaagccgatgcttgaacattccggccaccgtgtcacggtttttgatcttacggcgcatggtgtgaacatgagcagagtagaagatattcagactttggaggatttcgctaagccgttgcttgaggttcttgagtcttttggctcggatgataaagtagtcctcgtcgcgcatagcctcggtggaataccggctgctcttgcagccgacatgtttcctagtaaaatctctgttgctgtcttcgttacttcttttatgcccgacacaacgaatccaccttcttacgtgttcgaaaagtttctcggaagcattacagaagaagaacgtatggacttcgagttagggagctatggaacagatgaccatccactaaagactgcttttcttggacctaactacttgaagaatatgtatctactttctcctatcgaagattatgaattggccaaaatgttgatgagagtcacaccggctattactagtaatctgacggggactaaaagcttaacggcacaaggatatggatcgattagtcgtgtgtatatcgtatgcggagaagataaaggtatacgtgtagatttccaacgatggatgattgagaactctccggttaaagaagtgatggagatcaaagatgcagatcatatgcctatgttttccaagcctcatgaactctgtgatcgtcttctaaagattgctgataaatatccctaagcaagaatatctatgacaatatcaataattttcatgggaataagtttttttg

SEQ ID NO: 636 - protein, 256 aa, Arabidopsis thaliana
  REGION 29..250: note = Pfam Name: Abhydrolase_1 Pfam Description: alpha/beta hydrolase fold
  REGION 1..256: note = Ceres Clone ID no. 270875
  REGION 1..256: note = Bit score of 486.5 for HMM based on sequences of Figure 8
  REGION 1..256: note = Functional Homolog Of SEQ ID NO. 595
MKHYVLVHGGCHGAWCWYKVKPMLEHSGHRVTVFDLTAHGVNMSRVEDIQTLEDFAKPLLEVLESFGSDDKVVLVAHSLGGIPAALAADMFPSKISVAVFVTSFMPDTTNPPSYVFEKFLGSITEEERMDFELGSYGTDDHPLKTAFLGPNYLKNMYLLSPIEDYELAKMLMRVTPAITSNLTGTKSLTAQGYGSISRVYIVCGEDKGIRVDFQRWMIENSPVKEVMEIKDADHMPMFSKPHELCDRLLKIADKYP

SEQ ID NO: 637 - protein, 263 aa, Arabidopsis thaliana
  REGION 35..257: note = Pfam Name: Abhydrolase_1 Pfam Description: alpha/beta hydrolase fold
  REGION 1..263: note = Public GI ID no. 27754457
  REGION 1..263: note = Bit score of 671.9 for HMM based on sequences of Figure 8
  REGION 1..263: note = Functional Homolog Of SEQ ID NO. 595
MSEEKRKQHFVLVHGSCHGAWCWYKVKPLLEAVGHRVTAVDLAASGIDTTRSITDIPTCEQYSEPLTKLLTSLPNDEKVVLVGHSFGGLNLAIAMEKFPKKISVAVFLTAFMPDTEHSPSFVLDKFGSNMPQEAWMGTEFEPYGSDNSGLSMFFSPDFMKLGLYQLSPVEDLELGLLLMRPGSLFINDLSKMKNFSDEGYGSVPRVFIVCKEDKAIPEERQRWMIDNFPVNLVMEMEETDHMPMFCKPQQLSDYFLKIADKFV

SEQ ID NO: 638 - protein, 258 aa, Arabidopsis thaliana
  REGION 32..252: note = Pfam Name: Abhydrolase_1 Pfam Description: alpha/beta hydrolase fold
  REGION 1..258: note = Public GI ID no. 16648679
  REGION 1..258: note = Bit score of 486.1 for HMM based on sequences of Figure 8
  REGION 1..258: note = Functional Homolog Of SEQ ID NO. 595
MERKHHFVLVHNAYHGAWIWYKLKPLLESAGHRVTAVELAASGIDPRPIQAVETVDEYSKPLIETLKSLQENEEGILVGFSFGGINIALAADIFPAKIKVLVFLNAFLPDTTHVPSHVLDKYMEMPGGLGDCEFSSHETRNGTMSLLKMGPKFMKARLYQNCPIEDYELAKMLHRQGSFFTEDLSKKEKFSEEGYGSVQRVYVMSSEDKAIPCDFIRWMIDNFNVSKVYEIDGGDHMVMLSKPQKLFDSLSAIATDYM

SEQ ID NO: 639 - protein, 263 aa, Arabidopsis thaliana
  REGION 35..257: note = Pfam Name: Abhydrolase_1 Pfam Description: alpha/beta hydrolase fold
  REGION 1..263: note = Public GI ID no. 15227863
  REGION 1..263: note = Bit score of 691.9 for HMM based on sequences of Figure 8
  REGION 1..263: note = Functional Homolog Of SEQ ID NO. 595
MSEEKRKQHFVLVHGACHGAWCWYKVKPLLEALGHRVTALDLAASGIDTTRSITDISTCEQYSEPLMQLMTSLPNDEKVVLVGHSFGGLSLALAMDKFPDKISVSVFVTAFMPDTKHSPSFVEEKFASSMTPEGWMGSELETYGSDNSGLSVFFSTDFMKHRLYQLSPVEDLELGLLLKRPSSLFINELSKMENFSEKGYGSVPRAYIVCKEDNIISEDHQRWMIHNYPANLVIEMEETDHMPMFCKPQLLSDHLLAIADNFC

SEQ ID NO: 640 - DNA, 795 bp, Populus balsamifera
  misc_feature 1..795: note = Ceres Annot ID no. 1451282
  misc_feature 1..795: note = Encodes the peptide sequence at SEQ ID NO. 641
  source 1..795: mol_type = unassigned DNA; note = Populus balsamifera subsp. trichocarpa
atgggagaggtcaacaatcaaaaaaagcattttgttttgatccatggttcagttgcaggagcttggatatggtacaaggtcaagccaaggctagaggaagctggccaccgagtcacagctcttgacatggctgcatcaggggtgaacacaaaaacaattgaagaagttcgcactttcgatctgtataatgagcccttgatggagttcatggccaaattacctgaaaatgaaaaggttgtattggtggggcacagtttaggtggcttgaatctggcttttgctatggagaaattcccagagaaggtttctcttgctgtttttcttactgcaatcttgcctgataccgtgcaccagccatcttatatgttagaaaagtttgctgaaatcggtcccagggacgaagaatggcaagacactctgttttcattccatggaacccctgaagaaccgcatacatgtgttcatatgggttgcgagtttatgaagtgcaagccctttcatctttcctccgctgaggatctcgctctgcagatgctcttaaatagaccaggatcgatgtttgtggaaagcctgtccaaggcaaagaagttcactgatgagagatatggatcagtgccgcgagtttatattgtttgtactgaggatttaatgatgcttgcctcatttcagcgctggatgattgagcaaaatggggtaaaggaagtgatggagattcctgcagatcatatgccagttttttctacgcctacagaactctgccattctatactggagttggcacgcaagcatgcttag

SEQ ID NO: 641 - protein, 264 aa, Populus balsamifera
  REGION 36..258: note = Pfam Name: Abhydrolase_1 Pfam Description: alpha/beta hydrolase fold
  REGION 1..264: note = Ceres Annot ID no. 1451282
  REGION 1..264: note = Bit score of 540.7 for HMM based on sequences of Figure 8
  REGION 1..264: note = Functional Homolog Of SEQ ID NO. 595
  source 1..264: note = Populus balsamifera subsp. trichocarpa
MGEVNNQKKHFVLIHGSVAGAWIWYKVKPRLEEAGHRVTALDMAASGVNTKTIEEVRTFDLYNEPLMEFMAKLPENEKVVLVGHSLGGLNLAFAMEKFPEKVSLAVFLTAILPDTVHQPSYMLEKFAEIGPRDEEWQDTLFSFHGTPEEPHTCVHMGCEFMKCKPFHLSSAEDLALQMLLNRPGSMFVESLSKAKKFTDERYGSVPRVYIVCTEDLMMLASFQRWMIEQNGVKEVMEIPADHMPVFSTPTELCHSILELARKHA

SEQ ID NO: 642 - protein, 258 aa, Catharanthus roseus
  REGION 32..252: note = Pfam Name: Abhydrolase_1 Pfam Description: alpha/beta hydrolase fold
  REGION 1..258: note = Public GI ID no. 53830670
  REGION 1..258: note = Bit score of 723.2 for HMM based on sequences of Figure 8
  REGION 1..258: note = Functional Homolog Of SEQ ID NO. 595
MEVMKHFVTVHGVGHGAWVYYKLKPRIEAAGHRCTAVNLAASGINEKKLEEVRSSIDYAAPLLEVLDSVPENEKVILVGHSGGGMTAAVGMEKFPNKISLAVFLNAIMPDTENRPSYVLEEYTAKTPPEAWKDCQFSAYGDPPITSLVCGPEFISSTLYHLSPIEDHALGKILVRPGSLFIEDLLKAEKFTEEGFGSVPRVYVIAAEDKTIPPEFQRWMIENNPVKEVKEIKGADHMPMFSKPDELSQCLLDIAKKHA

SEQ ID NO: 643 - protein, 259 aa, Gentiana triflora
  REGION 32..253: note = Pfam Name: Abhydrolase_1 Pfam Description: alpha/beta hydrolase fold
  REGION 1..259: note = Public GI ID no. 146272405
  REGION 1..259: note = Bit score of 682.5 for HMM based on sequences of Figure 8
  REGION 1..259: note = Functional Homolog Of SEQ ID NO. 595
  source 1..259: note = Gentiana triflora var. japonica
MSPTKHFVAVHGVGHGAWVYYKLKPRIEAAGLKFTAIDLAAAGVNPKKLEEVNSLEEYCAPLFDVLAAVPEGEKVILVGHSGGGLSAAVGMEKFPKKISVAVFLNAIMPDTKNRPSYVMEEYTARTPIEAWKDTQFSAYGEPPITALLCGPEFISTSLYHLSPVEDHTLGKLLVRPGALFVEDLLKGAVKFTDEGFGSVPRVYVVATEDKTIPPEFQRWMIENNPVAEVKEIQGADHLPQFSKPDELTQVLVDIAKNHG

SEQ ID NO: 644 - DNA, 1739 bp, Glycine max
  misc_feature 1..1739: note = Ceres Clone ID no. 625057
  misc_feature 1..1739: note = Encodes the peptide sequence at SEQ ID NO. 645
  source 1..1739: mol_type = unassigned DNA
ctattcttacacggcatggatctcgtggccactctgttttagtttaatcagaagcaaaatccacaaaactaacagtgtattaaaatttctgaacctgaaaaattgttattattttgatagggtttataggaaaagcagcatacccgagttcacaaacactgaacgccgctgctccgtagtttcgatcgacgcattcttcacttcaagatatcacaatgtctataacgcacagcctcactactccactctcttcttcttcctctgctttcttagctccttcttccttcaattgcaggggacaggtttcgttgcctgtgaagagcgtgagcatttgcaaatgcgttgccacacccgaagctgagactgcctacaagacaggggtcaatcgcaatccaaatatggggaaacttcaagctggctatctctttcccgagattgctagaagaaggtctgcgcacttgctgaagtaccctgatgctaaagtaataagccttggaattggtgatacaactgaacctattcctgaagtcataactgatgcaatgtcaaagagatcacatgcattgtcgactatagaaggatacagtgggtatggagctgaacaaggtgaaaagccattaagaagggcacttgcttcaacattttacagcgatcttggcatagaagaggatgatatatttgtctcagatggagcaaagtgtgatatatctcgtctccagattgtctttgggtcaaatgtaaaaatggctgtgcaagacccttcatatccggcctatgtagactctagtgtaattatgggccagactggcctcttccagaagaatgttgagaagtttgcaaacattgaatacatgaggtgtaatccggaaaatggtttcttccctgatttgtcttcaatttctcgaccagatataatatttttctgttctccaaacaatcctactggtgctgtggcaacaagggaacaactgacccaactagttcagtttgctaaggacaatggttctatagtaatccacgattcagcttatgcaatgtatatttctggtgacaaccctcgctcaatatttgaaattcctggagccaaagaggttgccattgagacttcatcatttagcaagtatgctgggttcactggagtccgattgggttggactgtggttccgaagcagttgctgttttctgatggatttcctgttgccaaggacttcaaccgtattgtatgcacttgtttcaatggtgcttcaaatatttcccaggcaggcggtctggcttgcctttcaccagaaggtcttaaggctatgcgtgatgttattggattctacaaggaaaatactaacataataatggagacatttgattctcttgggtttaaagtctatggagggaaagatgcaccatatgtgtgggtccattttcccggccgaagctcatgggatgtattcgctgagattcttgagaagactcatgtggttacaacccctggtagtggttttggacctggtggtgaaggttttatcagggttagtgcctttggtcacagggaaaatgtcttggaggcatgcagaaggttcaagcagctatacaagtgaagttagaatatctcatttggtttcaagagttgttctcttggactgaagctagggctgtcttatttaaataatgcaattgattttccgtggagtttagattataagatgtaaagacagggtttatcaattgaggaagtatatttttct

SEQ ID NO: 645 - protein, 458 aa, Glycine max
  REGION 88..453: note = Pfam Name: Aminotran_1_2 Pfam Description: Aminotransferase class I and II
  REGION 1..458: note = Ceres Clone ID no. 625057
  REGION 1..458: note = Bit score of 1204.2 for HMM based on sequences of Figure 5
MSITHSLTTPLSSSSSAFLAPSSFNCRGQVSLPVKSVSICKCVATPEAETAYKTGVNRNPNMGKLQAGYLFPEIARRRSAHLLKYPDAKVISLGIGDTTEPIPEVITDAMSKRSHALSTIEGYSGYGAEQGEKPLRRALASTFYSDLGIEEDDIFVSDGAKCDISRLQIVFGSNVKMAVQDPSYPAYVDSSVIMGQTGLFQKNVEKFANIEYMRCNPENGFFPDLSSISRPDIIFFCSPNNPTGAVATREQLTQLVQFAKDNGSIVIHDSAYAMYISGDNPRSIFEIPGAKEVAIETSSFSKYAGFTGVRLGWTVVPKQLLFSDGFPVAKDFNRIVCTCFNGASNISQAGGLACLSPEGLKAMRDVIGFYKENTNIIMETFDSLGFKVYGGKDAPYVWVHFPGRSSWDVFAEILEKTHVVTTPGSGFGPGGEGFIRVSAFGHRENVLEACRRFKQLYK

SEQ ID NO: 646 - DNA, 1701 bp, Gossypium hirsutum
  misc_feature 1..1701: note = Ceres Clone ID no. 1925947
  misc_feature 1..1701: note = Encodes the peptide sequence at SEQ ID NO. 647
  source 1..1701: mol_type = unassigned DNA
aaggcatcacatttgtggttatttggccgcataaaaaagaagcagctttttccattaatttcggagggaaaaaaaaggggaaaaaaaatctgaaaatgtctctgatgaacaatctatcaacttcaatgatttcttcatcttcatctactttcttggctccaaccagtttcaattcaagcagaacccagagtgtttcagttccattgaaaagcatcaatatagttaaatgtgttgccactcctcaagaacaacaaaatgcttacaaaactaaagtttctcgcaatgcgaacatagctaagcttcaagctggttacctgtttccagaggttgccaggagaagggctgcacacttgctcaagtacccgaatgctcaagtgataagccttggaatcggtgatactactgaacctattccagatgttattacgtctgcaatggctaagaggtctcatgcattgtctacgctggagggttacagtggttatggagctgaacaaggtgaaaaggcattgagagctgcacttgcttcaacattctatcgcaaccttggcattgaggatgatgatatttttgtctcagatggtgctaaatgtgacatatctcgccttcaggttgttttcggatctaatgtcacaatggcagtgcaagacccgtcatacccggcttacgtagattccagcgttatcatgggtcagaccggacagtttcaaaaggatgttgagaagtatggaaatatcgagtatatgaggtgtacacccgagaatggattctttcctgatttatccaaagttgctagaactgatatcatattcttctgttcaccaaacaatcctactggtgctgctgcaacacgagagcaattgactcgattggttaagtttgcaaaggacaatgggtctatcatagtctatgattctgcatatgctatgtatatgtcagacgataaccctcgttctatctttgaaattccaggagcaaaagaggttgcaattgaaacagcttcttttagtaagtatgctgggtttactggggttcgtctcggttggactgttattccaaaacagcttctgttctcagatggattccctgttgccaaagacttcaaccgtatcgtttgtacttgctttaacggtgcatctaatattgcccaagctggtggcttggcttgcctttcatccgaagggctcgaggccatgcaagaggtgatcggcttctataaagaaaacaccaaaattatagtagaaacgttcaactcgcttgggtttaaagtatatggaggaaagaatgcaccatacgtgtgggttcacttccctggccgtagctcatgggatgtgttcagcgaaatactcgagaagacccacattgttactacgcctggaagtggtttcggacctggcggtgaaggtttcatcagagtcagcgcatttggtcacagggagaatgtcttggaagcttgcagaagattcaagcagctttacaattgaatctaatagcatttgactggttacctcggtttcagacccgagacgaaaggccgtatgcttctatgatttttgttctcaattccgtaatattgcttgtaatatctcgtcagattctatgcttagaaaagactagtaatgcttcttatttatcctgtaacattcactgaaaactacctttttatttatataaataaccgcttgtattcgccaagcaaat

SEQ ID NO: 647 - protein, 462 aa, Gossypium hirsutum
  REGION 92..457: note = Pfam Name: Aminotran_1_2 Pfam Description: Aminotransferase class I and II
  REGION 1..462: note = Ceres Clone ID no. 1925947
  REGION 1..462: note = Bit score of 1229.4 for HMM based on sequences of Figure 5
  REGION 1..462: note = Functional Homolog Of SEQ ID NO. 645
MSLMNNLSTSMISSSSSTFLAPTSFNSSRTQSVSVPLKSINIVKCVATPQEQQNAYKTKVSRNANIAKLQAGYLFPEVARRRAAHLLKYPNAQVISLGIGDTTEPIPDVITSAMAKRSHALSTLEGYSGYGAEQGEKALRAALASTFYRNLGIEDDDIFVSDGAKCDISRLQVVFGSNVTMAVQDPSYPAYVDSSVIMGQTGQFQKDVEKYGNIEYMRCTPENGFFPDLSKVARTDIIFFCSPNNPTGAAATREQLTRLVKFAKDNGSIIVYDSAYAMYMSDDNPRSIFEIPGAKEVAIETASFSKYAGFTGVRLGWTVIPKQLLFSDGFPVAKDFNRIVCTCFNGASNIAQAGGLACLSSEGLEAMQEVIGFYKENTKIIVETFNSLGFKVYGGKNAPYVWVHFPGRSSWDVFSEILEKTHIVTTPGSGFGPGGEGFIRVSAFGHRENVLEACRRFKQLYN

SEQ ID NO: 648 - DNA, 1386 bp, Populus balsamifera
  misc_feature 1..1386: note = Ceres Annot ID no. 1514501
  misc_feature 1..1386: note = Encodes the peptide sequence at SEQ ID NO. 649
  source 1..1386: mol_type = unassigned DNA; note = Populus balsamifera subsp. trichocarpa
atgtcgccgacgcaacttttatcgacttcgatttcttcttcttcctctgcttttttagccgcacctattgccttcaaagctagaaaccagaatgtttcgatcgcgtcgaaaacgccttctatttgcacgtgtgctgctgctcctcaagaacagaaaaccgtttacaaaacacaagtctcccgcaatgcaaatattgcaaagcttcaagctggttacttatttccagaggttgctcgaaggaggaatgcgcacatgctgaaataccctgatgcaaaagtgataagccttggaattggtgacactacagaacctatcccagaagttataacttctgcaatagcaaagagagcagaagcactgtctactttggagggttacagtggttatggacctgaacaaggtgaaaaacctttgagaactgcaattgcttcaacattttattcaggtcttgggatcgaggaggatgatatatttgtctctgatggtgccaaatgtgacatatctcgcctccagatggtatttggggcaaatgtaaccatggcagtgcaagatccatcatacccggcttacgttgattctagtgtcatcatgggccagactggacagtttcagaaagacgttgagaagtacggtaagattgaatacatgaggtgcactccagagaatggttttttccctgatttatccaaagtttctcgaacggatatcatatttttctgttcaccgaacaatcctactggttctgctgcaacaagggagcaactgacccaactagtacaatttgcaaaggacaatggatcaatcatcgtctatgattcagcatatgccatgtatatgtctgatgataacccacgatccatatttgaaattccgggagccaaagaggttgctttggagacatcatcttttagtaagtatgctgggtttactggagttcgtctggggtggactgttgttccaaaacagcttctatattctgatgggttcccagttgtaaaggatttcaaccgtgttgtttgcactagctttaatggggcatccaacatttgccaagctggtggtcgggcttgcctttcacctgaaggccttaaggcaatgagtgaggtgattggattctataaagaaaactccaacattataatggatacattcaattcgctcggttttaatgtatatggaggaaagaatgctccctatgtgtgggttcacttccctggccaaagctcgtgggatgttttcagtgaaattcttgagaaaactcatgtagttaccacacctgggagtggttttggacctggtggggaaggttttgtcagagtcagtgcttttggccacagggaaaatgttttagaagcctgcagaagattcaagcagctttacaattga

SEQ ID NO: 649 - protein, 461 aa, Populus balsamifera
  REGION 91..456: note = Pfam Name: Aminotran_1_2 Pfam Description: Aminotransferase class I and II
  REGION 1..461: note = Ceres Annot ID no. 1514501
  REGION 1..461: note = Bit score of 1200.7 for HMM based on sequences of Figure 5
  REGION 1..461: note = Functional Homolog Of SEQ ID NO. 645
  source 1..461: note = Populus balsamifera subsp. trichocarpa
MSPTQLLSTSISSSSSAFLAAPIAFKARNQNVSIASKTPSICTCAAAPQEQKTVYKTQVSRNANIAKLQAGYLFPEVARRRNAHMLKYPDAKVISLGIGDTTEPIPEVITSAIAKRAEALSTLEGYSGYGPEQGEKPLRTAIASTFYSGLGIEEDDIFVSDGAKCDISRLQMVFGANVTMAVQDPSYPAYVDSSVIMGQTGQFQKDVEKYGKIEYMRCTPENGFFPDLSKVSRTDIIFFCSPNNPTGSAATREQLTQLVQFAKDNGSIIVYDSAYAMYMSDDNPRSIFEIPGAKEVALETSSFSKYAGFTGVRLGWTVVPKQLLYSDGFPVVKDFNRVVCTSFNGASNICQAGGRACLSPEGLKAMSEVIGFYKENSNIIMDTFNSLGFNVYGGKNAPYVWVHFPGQSSWDVFSEILEKTHVVTTPGSGFGPGGEGFVRVSAFGHRENVLEACRRFKQLYN

SEQ ID NO: 650 - DNA, 1386 bp, Arabidopsis thaliana
  misc_feature 1..1386: note = Ceres Annot ID no. 849672
  misc_feature 1..1386: note = Encodes the peptide sequence at SEQ ID NO. 651
  source 1..1386: mol_type = unassigned DNA
atgtcgtcgacccatcagttagtttcttcgatgatctcttcttcctcatccactttcttagccccttcaaattttaatctcagaactcgaaatgcttgcttacccatggcaaaacgggtcaatacttgcaaatgtgttgctacgccgcaagagaagatcgagtataagaccaaagtgtcacggaattcaaacatgtccaaacttcaggctggatacctattcccggagattgcaagaagaaggtctgcacacttgttgaaatatccagatgcacaagttataagtcttggaataggcgacacaactgagccaattcctgaagtgatcacttctgctatggcaaagaaagctcatgagttgtcaacaatagagggatatagtggttatggtgctgaacaaggtgcaaagccactgagagctgctattgcgaaaacattctacggtggccttggcataggggatgatgacgtttttgtttctgatggagctaaatgtgatatctcacgtctccaggttatgtttggttccaatgttacaattgctgttcaggatccttcatatccggcttatgtggactccagtgttattatgggtcagactgggcaatttaacactgatgtgcaaaagtatggaaacatcgagtacatgagatgcactccagagaatggcttctttcccgacttgtccaccgttggcaggacagatataattttcttctgttccccaaataaccctacgggtgctgctgccacgagagagcaactaacgcagttagttgagtttgcaaagaagaacggttctataatagtgtatgattccgcctatgcaatgtacatgtctgatgataacccacgatccatcttcgaaatccctggagcagaggaggtcgctatggagacagcttcgttcagcaaatatgctggtttcactggagttcgacttggttggactgtcatcccgaaaaagctactctattcagacggtttccctgttgccaaagacttcaatcggattatctgcacttgtttcaatggtgcatctaatatctctcaagctggtgctcttgcttgccttacacccgaaggacttgaggcaatgcataaggtgattggattctataaagaaaacacaaacataatcattgacacattcacatctctcgggtatgatgtatatggaggaaagaatgcgccttacgtatgggttcacttcccgaaccaaagctcatgggatgtgtttgctgagattctggagaagactcatgtggttacaactccaggaagtgggtttggaccagggggtgaagggttcgttcgtgtcagtgcctttggtcacagagagaacatcttagaggcatgtcgaagattcaagcagctttacaaatga

SEQ ID NO: 651 - protein, 461 aa, Arabidopsis thaliana [sequence omitted]

SEQ ID NO: 652 - protein, 459 aa, Vitis vinifera
  REGION 89..454: note = Pfam Name: Aminotran_1_2 Pfam Description: Aminotransferase class I and II
  REGION 1..459: note = Public GI ID no. 157355942
  REGION 1..459: note = Bit score of 1189.7 for HMM based on sequences of Figure 5
  REGION 1..459: note = Functional Homolog Of SEQ ID NO. 645
MYSLMSSPSISSSSSSFLGQTHFDSRNPNACLPTKDSWICKCVATPSTETTAHTTKVSRNANMAKLQAGYLFPEIARRRSAHMLKYPDAQVISLGIGDTTEPIPEVITSGMAKKAHALSTLEGYSGYGAEQGEKQLRAAIASTFYGDLSIEESDIFVSDGAKSDISRLQVMFGSNVTMAVQDPSYPAYVDLSVILGQTGQFQKDVEKYGNIEYMKCNPENGFFPDLSTVSRTDIIFFCSPYNPTGNAATREQLTRLVQFAKDNGSILVYDSGYAMYISDDSPRSIFEIPGAKEVAIEVSSFSKYAGFTGVRLGWTVVPKELLYSDGFPVAKDFNRIECTTFNAASNISQASGLACLSPEGLEAMHKLVGFYKENTNIIMETFTSLGFSVYGGKNAPYVWVHFPGQSSWDVFSEILEKTHVVTTPGSGFGPAGDGFIRVCAFSHRGNVLEACKRFKRLYK

SEQ ID NO: 653 - protein, 464 aa, Oryza sativa
  REGION 94..459: note = Pfam Name: Aminotran_1_2 Pfam Description: Aminotransferase class I and II
  REGION 1..464: note = Public GI ID no. 115452503
  REGION 1..464: note = Bit score of 1198.1 for HMM based on sequences of Figure 5
  REGION 1..464: note = Functional Homolog Of SEQ ID NO. 645
  source 1..464: note = Oryza sativa subsp. japonica
MAASPAAGAAAATVSSFVSPSSFSSVKASKPDRLRPARRAAAVNVRCVSSPPATETSFKTKVPRNANMAKLQAGYLFPEIARRRAAHLLKFPDAKIISLGIGDTTEPIPDVITNAMAKRAHALSTVDGYSGYGAEQGEKKLRAAIAATYYADLGIEETDIFVSDGAKCDISRLQVLFGSNVKIAVQDPSYPAYVDSSVIMGQTGLYQEDVQKYGNIEYMKCSPENGFFPDLSSVPRTDIIFFCSPNNPTGAAASRDQLTKLVKFAKDNGSIIVYDSAYAMYISDDSPKSIFEIPGAKEVAIETASFSKYAGFTGVRLGWTVVPKELLFSDGHPVAKDFNRIVCTCFNGASNISQAGGLGCLSPEGLKAMSDVVGFYKENTKIIVDTFTSLGFNVYGAKNAPYVWVHFPGRNSWDVFAEILEKAHVVTTPGSGFGPGGEGFVRVSAFGHRENIIEAARRLKQLYK

SEQ ID NO: 654 - DNA, 1695 bp, Panicum virgatum
  misc_feature 1..1695: note = Ceres Clone ID no. 1790933
  misc_feature 1..1695: note = Encodes the peptide sequence at SEQ ID NO. 655
  source 1..1695: mol_type = unassigned DNA
acccgcactgcacactccccttaccctttcctacgccgccgcctcttctgctgacgccatggccgccgcccccgcctcttctgccgccgctatggccgcggcacccgcaatcaccgcgtcctcctcctttgtctcgtcgtcgccgtgctctctcagggtgtcgaagacaagcccccggcgacccacgggaagagtgtcccacaaaatcagctgcgtcagtagcccaccggccgccgaaacatcttacaagactagtgtcccgcgcaatgctaacatggccaagctccaagcaggatatttatttcctgagattgccaggagaagagcagctcatttgctcaagttccctgatgctaagattataagccttgggataggtgacactacggagcccattccagatgtcataacgaatgccatggcagagagagcacatgccttatcaacaattgatggctacagtggttatggagctgagcaaggtgaaaagaaactaaggtcagcaattgctgcaacctactatgtggaccttggtattgaagattcagacatatttgtctctgatggtgccaaatgtgacatttcccgcctgcaggttctttttggatctaatgtgacgattgcggtccaagacccatcataccctgcatatgttgattcaagtgttatcatgagccaaactggcttatatcagcaagatgttcagaagtacgggaacatcgagtacatgagatgcaatcctgaaaatggatttttccctgatctgtcaactgtcccacgtacagatataattttcttttgctcaccgaacaaccccactggtgctgctgcctctcgggaccaactgacgagactagtcaaatttgctaaggacaatgggtctatcattgtctatgattctgcctatgctatgtacatatcagatgatagcccaaagtctatctttgaaattcctggtgcgagagaggttgccattgagacagcatcattctcgaaatatgctgggttcactggtgtccgtctaggttggactgttgtccccaaggagcttcttttctcagatgggcatccagtcgctaaagatttcaaccgcattgtgtgcacctgcttcaatggcgcatcaaacattgctcaagctggtggcttagcttgcctctctccagagggtctgaaggctatgcatgatgttgttggcttctacaaggagaatactgaaataattgtcgacacgtttacatcgcttggattcaatgtatatggtgccaagaacgctccttatgtgtgggtgcacttccctggtcgcaattcgtgggatgtgttcgctgagatccttgagaaggcgaacgttgtcactacgcctggcagtggatttggacctggcggcgaaggctttgtgagggtcagcgcgtttggccacagagaaaacatcattgaagccgctaggagattaaaacagctgtacaagtgagcactgacgcagcttcagtaacgtcttggaaggacgatatcaataagattgcatcatgatttggaacaccaaattcgctctgtcgagctacttggagatattagaagcgaaacttgataatttcctaggcttttatgttgtggtagttctttcaaataatttccaattcgaaagatgcttgttgtatccccgagacatttgaatcaccaggtagtggttatatggcc

SEQ ID NO: 655 - protein, 469 aa, Panicum virgatum
  REGION 99..464: note = Pfam Name: Aminotran_1_2 Pfam Description: Aminotransferase class I and II
  REGION 1..469: note = Ceres Clone ID no. 1790933
  REGION 1..469: note = Bit score of 1198.3 for HMM based on sequences of Figure 5
  REGION 1..469: note = Functional Homolog Of SEQ ID NO. 645
MAAAPASSAAAMAAAPAITASSSFVSSSPCSLRVSKTSPRRPTGRVSHKISCVSSPPAAETSYKTSVPRNANMAKLQAGYLFPEIARRRAAHLLKFPDAKIISLGIGDTTEPIPDVITNAMAERAHALSTIDGYSGYGAEQGEKKLRSAIAATYYVDLGIEDSDIFVSDGAKCDISRLQVLFGSNVTIAVQDPSYPAYVDSSVIMSQTGLYQQDVQKYGNIEYMRCNPENGFFPDLSTVPRTDIIFFCSPNNPTGAAASRDQLTRLVKFAKDNGSIIVYDSAYAMYISDDSPKSIFEIPGAREVAIETASFSKYAGFTGVRLGWTVVPKELLFSDGHPVAKDFNRIVCTCFNGASNIAQAGGLACLSPEGLKAMHDVVGFYKENTEIIVDTFTSLGFNVYGAKNAPYVWVHFPGRNSWDVFAEILEKANVVTTPGSGFGPGGEGFVRVSAFGHRENIIEAARRLKQLYK

SEQ ID NO: 656 - DNA, 1389 bp, Sorghum bicolor
  misc_feature 1..1389: note = Ceres Annot ID no. 8641620
  misc_feature 1..1389: note = Encodes the peptide sequence at SEQ ID NO. 657
  source 1..1389: mol_type = unassigned DNA
atggcagcagcccctgccggtgcccccgcaatcaccgcctcatcctcctttcttgcttcgccgccgttcgctctcaaggcatcgacgactagccaccgccgacctgcggggagagtctccgtcaacatccgctgcgtcagtagcccgccggccgtcgacacatcttacaagactaatgtcccgcgcaatgctaacatggccaagctccaagcaggatatctgtttcctgagattgccaggagaagagcagctcatttgctgaagtatccagatgccaagataataagccttgggataggtgacactaccgagcccattccaaatgtcataacaaatgccatggcagagagagcacttgccttgtcaacaattgatggctacagcggttatggagccgagcaaggtgaaaagaaactcagagcagcaattgctgcaacctactatgcggaccttggtattgaagattcagatatttttgtctctgatggtgccaagtgtgacatatctcgcttgcaggtcctttttggatctaatgtgacaattgcggtccaagatccctcataccctgcatatgttgattcaagtgttatcatgggccaaactgacttatatcagcaagatgttcagaagtacggaaacattcaatacatgagatgcagtccagaaaatggatttttccctgatctgtcaactatccctcggacagatattattttcttttgttcacccaacaatcctactggtgctgctgcatctcgggaccaactgaccaaattagtaaaatttgcaaaggacaatgggtccatcattgtctatgattctgcttatgcaatgtacatatcagatgacagcccaaagtctatctttgaaattcctggagcaaaggaggttgctcttgagacagcgtcattctcgaaatatgctgggttcactggtgtccgtctaggttggactgttgtccccaaggagctccttttctctgatggacatccagttgctaaagatttcaatcgcatagtctgcacttgcttcaatggtgcatcaaacatttcacaagctggtggtttagcttgcctctctccagagggtctgaaggctatgcatgatgttgttggcttctacaaggagaacactgaaataattgttgacacatttacatcacttggattcaacgtgtatggtgcgaagaacgctccttacgtatgggtgcacttccctggccgcaattcgtgggacgtgtttgctgagatcctggagaaggcgaatgtggttactactcctggcagtggatttggaccgggtggcgaaggctttgtgagggtcagcgcattcggacacagagataacatcattgaagctgcaaggagattaaagcagctgtacaagtga

SEQ ID NO: 657 - protein, 462 aa, Sorghum bicolor
  REGION 92..457: note = Pfam Name: Aminotran_1_2 Pfam Description: Aminotransferase class I and II
  REGION 1..462: note = Ceres Annot ID no. 8641620
  REGION 1..462: note = Bit score of 1203.6 for HMM based on sequences of Figure 5
  REGION 1..462: note = Functional Homolog Of SEQ ID NO. 645
MAAAPAGAPAITASSSFLASPPFALKASTTSHRRPAGRVSVNIRCVSSPPAVDTSYKTNVPRNANMAKLQAGYLFPEIARRRAAHLLKYPDAKIISLGIGDTTEPIPNVITNAMAERALALSTIDGYSGYGAEQGEKKLRAAIAATYYADLGIEDSDIFVSDGAKCDISRLQVLFGSNVTIAVQDPSYPAYVDSSVIMGQTDLYQQDVQKYGNIQYMRCSPENGFFPDLSTIPRTDIIFFCSPNNPTGAAASRDQLTKLVKFAKDNGSIIVYDSAYAMYISDDSPKSIFEIPGAKEVALETASFSKYAGFTGVRLGWTVVPKELLFSDGHPVAKDFNRIVCTCFNGASNISQAGGLACLSPEGLKAMHDVVGFYKENTEIIVDTFTSLGFNVYGAKNAPYVWVHFPGRNSWDVFAEILEKANVVTTPGSGFGPGGEGFVRVSAFGHRDNIIEAARRLKQLYK

SEQ ID NO: 658 - DNA, 1718 bp, Zea mays
  misc_feature 1..1718: note = Ceres Clone ID no. 281497
  misc_feature 1..1718: note = Encodes the peptide sequence at SEQ ID NO. 659
  source 1..1718: mol_type = unassigned DNA
aaaaaaactcacatcgttccctacaccctactccctccgtcagccagcgaagttccttcagtcactcaacaccttacgtccctagccatcctccgccgcctccgtctctgcttccctagagccgtcgcgatggcagcagcccctgccggtgcccctgcaatcaccgcatcctcctcctttgtttcttcgtctccgttctgtctcaaggcatcgatgaccagccagcgccgacccgcggggagagtctccatcgtcatccgctgcgtcagtagcccgccggccgtcgacacatctttcaagactaatgtcccgcgcaatgctaatatggccaaactccaagcaggatatttgtttcctgagattgccaggagaagagccgctcatttgctgaagtttccagatgccaaaattataagccttggaataggcgacactaccgagcccattccaaatgtcataacaaatgccatggcagagagagcacatgccttgtcaacaattgatggctacagcggttatggagctgagcaaggtgaaaagaaactcagagcagcaattgctgcaacctactatgcggaccttggtattgaagattcagacatatttgtctctgatggtgccaaatgtgacatatctcgcttgcaggtcctttttggatctaatgtgacaattgcggtccaagatccatcataccctgcatatgttgattcaagtgttatcatggggcaaactgatttatatcagcaagacgttcagaagtatggaaacattgagtacatgagatgcggtccagaaaatggattttttcctgatctgtcaactgtccctaggacagatattattttcttttgttcacccaacaatcctactggtgctgctgcatctcgggaccaactaaccaaattagtaaaatttgcaaaggacaacgggtccatcatagtctatgattctgcttatgcaatgtacatatcagatgacagcccaaagtctatctttgaaattcctggagcaaaggaggttgctattgagacagcctcattctcgaaatacgctgggttcacaggtgtccgtmtaggttggactgttgtccccaaggagctccttttctcggatggacatccagttgctaaagatttcaatcgcatagtttgcacttgcttcaatggtgcatcaaacattgcgcaagctggtggtttagcctgcctctctccagacggtctaaaggctatgcaagatgttgttggcttctacaaggagaacactgaaataatsgttgagacatktacatcactcggattcaacgtgtatggcgccaagaacgctccatacgtatgggtgcacttccctggccgcaattcgtgggatgtgttcgctgagatcctggagaaggccaatgtggtcactactcctggcactggatttggaccgggtggcgaaggctttgtgagggtcagcgcgttcgggcacagagagaacatcattgaagccgcaaggaggtyaaagcagctgtataagtgagcaccgatgcagcttctgtgccctcctagacagatgtatcaataagaacacatcagggcaccaaaaatcgcttggtgaagctgccagaagatgttagattttgaacttttttttttaattctcgtgcggtgtctacattcraaccatttcgaactctagacaatgcttgttgtaatcctgagacccttcattcactggtg

SEQ ID NO: 659 - protein, 462 aa, Zea mays
  REGION 92..457: note = Pfam Name: Aminotran_1_2 Pfam Description: Aminotransferase class I and II
  REGION 1..462: note = Ceres Clone ID no. 281497
  REGION 1..462: note = Bit score of 1192.4 for HMM based on sequences of Figure 5
  REGION 1..462: note = Functional Homolog Of SEQ ID NO. 645
  UNSURE 315: note = X is any aa, unknown, or other
  UNSURE 381: note = X is any aa, unknown, or other
  UNSURE 385: note = X is any aa, unknown, or other
  UNSURE 457: note = X is any aa, unknown, or other
MAAAPAGAPAITASSSFVSSSPFCLKASMTSQRRPAGRVSIVIRCVSSPPAVDTSFKTNVPRNANMAKLQAGYLFPEIARRRAAHLLKFPDAKIISLGIGDTTEPIPNVITNAMAERAHALSTIDGYSGYGAEQGEKKLRAAIAATYYADLGIEDSDIFVSDGAKCDISRLQVLFGSNVTIAVQDPSYPAYVDSSVIMGQTDLYQQDVQKYGNIEYMRCGPENGFFPDLSTVPRTDIIFFCSPNNPTGAAASRDQLTKLVKFAKDNGSIIVYDSAYAMYISDDSPKSIFEIPGAKEVAIETASFSKYAGFTGVRXGWTVVPKELLFSDGHPVAKDFNRIVCTCFNGASNIAQAGGLACLSPDGLKAMQDVVGFYKENTEIXVETXTSLGFNVYGAKNAPYVWVHFPGRNSWDVFAEILEKANVVTTPGTGFGPGGEGFVRVSAFGHRENIIEAARRXKQLYK

SEQ ID NO: 660 - protein, 465 aa, Physcomitrella patens
  REGION 92..457: note = Pfam Name: Aminotran_1_2 Pfam Description: Aminotransferase class I and II
  REGION 1..465: note = Public GI ID no. 168013851
  REGION 1..465: note = Bit score of 1134.3 for HMM based on sequences of Figure 5
  REGION 1..465: note = Functional Homolog Of SEQ ID NO. 645
  source 1..465: note = Physcomitrella patens subsp. patens
MSIPSARLCTVPATRNLSSSVSFSTATSLLPKVSVTRGASVSLIRCIAEPAEKTTYTTSVNRNANIAKLQAGYLFPEIARRRNAHIQRYPDAKVISLGIGDTTEPIPTVITGAMEARARALSTLEGYSGYGAEQGEKPLRAGIGAAFYADLGIDETEIFVSDGAKCDITRLQLVFGPNVTMAAQDPSYPAYVDTSVMMGQTGLFQSDSQQYSKIQYMKCTPENDFFPDLSSTPRTDIIFFCSPNNPTGASASRKQLEELVAFAKKNGSIIVYDSAYAIYTSDDSPKSIYEIPGAKECAIETASFSKYAGFTGVRLGWTVVPKALKFADGHPVHTDFNRVMTTCFNGASNVAQAGGLACVSSEGLKAMHETVKFYKENTKILVETFESLGFKTFGGKNAPYVWVQFPGKSSWDVFSEILEQTHIVTTPGSGFGPGGEGFIRASAFGHRENILEASRRLKEYFGSKK

SEQ ID NO: 661 - DNA, 1503 bp, Arabidopsis thaliana
  misc_feature 1..1503: note = Ceres Clone ID no. 143214
  misc_feature 1..1503: note = Encodes the peptide sequence at SEQ ID NO. 662
  source 1..1503: mol_type = unassigned DNA
attttgctctgcaaatttgtctgaaaaaatctttgtgcgaagcaggaaaaatgtcgtcgacccatcagttagtttcttcgatgatctcttcttcctcatccactttcttagccccttcaaattttaatctcagaactcgaaatgcttgcttacccatggcaaaacgggtcaatacttgcaaacttcaggctggatacctattcccggagattgcaagaagaaggtctgcacacttgttgaaatatccagatgcacaagttataagtcttggaataggcgacacaactgagccaattcctgaagtgatcacttctgctatggcaaagaaagctcatgagttgtcaacaatagagggatatagtggttatggtgctgaacaaagtgcaaagccactgagagctgctattgcgaaaacattctacggtggccttggcataggggatgatgacgtttttgtttctgatggagctaaatgtgatatctcacgtctccaggttatgtttggttccaatgttacaattgctgttcaggatccttcatatccggcttatgtggactccagtgttattatgggtcagactgggcaatttaacactgatgtgcaaaagtatggaaacatcgagtacatgagatgcactccagagaatggcttctttcccgacttgtccaccgttggcaggacagatataattttcttctgttccccaaataaccctacgggtgctgctgccacgagagagcaactaacgcagttagttgagtttgcaaagaagaacggttctataatagtgtatgattccgcctatgcaatgtacatgtctgatgataacccacgatccatcttcgaaatccctggagcagaggaggtcgctatggagacagcttcgttcagcaaatatgctggtttcactggagttcgacttggttggactgtcatcccgaaaaagctactctattcagacggtttccctgttgccaaagacttcaatcggattatctgcacttgtttcaatggtgcatctaatatctctcaagctggtgctcttgcttgccttacacccgaaggacttgaggcaatgcataaggtgattggattctataaagaaaacacaaacataatcattgacacattcacatctctcgggtatgatgtatatggaggaaagaatgcgccttacgtatgggttcacttcccgaaccaaagctcatgggatgtgtttgctgagattctggagaagactcatgtggttacaactccaggaagtgagtttggaccagggggtgaagggttcgttcgtgtcagtgcctttggtcacagagagaacatcttagaggcatgtcgaagattcaagcagctttacaaatgaagaaccttgtttgtaatcgttcctcatcatcatcaccctctttaatgacatgatttgagttaaaataatgtcgtttccattgttttctggaatttgtagaagacacttttgacaccagtgtttcaagcaatttggc

SEQ ID NO: 662 - protein, 438 aa, Arabidopsis thaliana
  REGION 68..433: note = Pfam Name: Aminotran_1_2 Pfam Description: Aminotransferase class I and II
  REGION 1..438: note = Ceres Clone ID no. 143214
  REGION 1..438: note = Bit score of 1113.6 for HMM based on sequences of Figure 5
  REGION 1..438: note = Functional Homolog Of SEQ ID NO. 645
MSSTHQLVSSMISSSSSTFLAPSNFNLRTRNACLPMAKRVNTCKLQAGYLFPEIARRRSAHLLKYPDAQVISLGIGDTTEPIPEVITSAMAKKAHELSTIEGYSGYGAEQSAKPLRAAIAKTFYGGLGIGDDDVFVSDGAKCDISRLQVMFGSNVTIAVQDPSYPAYVDSSVIMGQTGQFNTDVQKYGNIEYMRCTPENGFFPDLSTVGRTDIIFFCSPNNPTGAAATREQLTQLVEFAKKNGSIIVYDSAYAMYMSDDNPRSIFEIPGAEEVAMETASFSKYAGFTGVRLGWTVIPKKLLYSDGFPVAKDFNRIICTCFNGASNISQAGALACLTPEGLEAMHKVIGFYKENTNIIIDTFTSLGYDVYGGKNAPYVWVHFPNQSSWDVFAEILEKTHVVTTPGSEFGPGGEGFVRVSAFGHRENILEACRRFKQLYK

SEQ ID NO: 663 - DNA, 1678 bp, Panicum virgatum
  misc_feature 1..1678: note = Ceres Clone ID no. 1781022
  misc_feature 1..1678: note = Encodes the peptide sequence at SEQ ID NO. 664
  source 1..1678: mol_type = unassigned DNA
gtcccccgtgacagcgaagcagaggctcatcaccctacccaagtacccatcctccgccgccgccatggcagcagcccccaccggcggccccgccatcaccatgtcctcctcctccttcctctctccgtcgccgttctatgtcaaggcgtcgaggaccagccaccgccgacccgccaggagaatgcctgtcaccgtccgctgcgtcagtagcccgccggccgccgatacagctcacaagactagtgtcccgcgcaatgcaaacatgaccaagctccaagcaggatatctgtttcctgagatagccaggagaagagcagctcatttgctgaagtaccctgatgctgagattataagccttgggataggtgacactaccgagcccattcctgacgtcataacaaatgccatggcagagagagcacatgccttatcaacaattgatggctacagtggttatggagctgagcaaggtgaaaagaaactaagggcagcaattgctgcaacctactatgcggaccttggtattgaagattcagacatatttgtctctgatggtgccaaatgtgacatttctcgcctccaggtcctttttggatctaatgtgacaattgcggtccaagacccatcataccctgcatatgttgattcaagtgttatcatgggccaaaccgacttatatcagcaagatgttcagaagtatgggaacattgagtacatgagatgcaatcccgaaaatggatttttccctgatctgtcaactgtcccacgaacagatataattttcttttgttcacccaacaaccctactggtgctgctgcatctcgggaccaactaacaaaactagtcaaatttgctaaggacaatgggtccatcattgtctatgattctgcttatgctatgtacatatcagatgatagtccaaagtccatctttgaaattcctggagcaaaagaggttgccattgagacagcatcattctcaaaatatgctgggttcactggtgtccgtctaggttggactgttgtccccaaggaacttcttttctcagatggacatccagttgctaaagatttcaaccgcatagtctgcacttgcttcaatggcgcatcaaacattgctcaagctggtggcttagcttgcctctctacagagggcctgaaggctatgcgtgacgtcgttggcttctacaaggagaacactgaaataattgttgacacatttacatcgcttgggttcaacgtgtatggtgccaagaacgctccttacgtgtgggtgcacttccctgatcgcaagtcgtgggatgtgttcgctgagatcctcgagaaggcaaacgttgtcactactcctggcagtggatttggaccaggcggcgaaggctttgtgagggtcagtgcattcggccacagagagaacatcattgaagccgctaggagattaaagcatatgtacaaatgagcaccgacgcaacttctgtatcgcacttgaaggactgtaccaataagatcacagctggatttggaatgccaaatcctctctttggagctaccaggagatattagaagtgatacttgataatttcgtaggctttttttttaatggtgttactccattcaaaccatttccattttgaaataatgctttgtatacctgaggcgtttaaatcaccaatggttatat

SEQ ID NO: 664 - protein, 463 aa, Panicum virgatum
  REGION 93..458: note = Pfam Name: Aminotran_1_2 Pfam Description: Aminotransferase class I and II
  REGION 1..463: note = Ceres Clone ID no. 1781022
  REGION 1..463: note = Bit score of 1192.3 for HMM based on sequences of Figure 5
  REGION 1..463: note = Functional Homolog Of SEQ ID NO. 645
MAAAPTGGPAITMSSSSFLSPSPFYVKASRTSHRRPARRMPVTVRCVSSPPAADTAHKTSVPRNANMTKLQAGYLFPEIARRRAAHLLKYPDAEIISLGIGDTTEPIPDVITNAMAERAHALSTIDGYSGYGAEQGEKKLRAAIAATYYADLGIEDSDIFVSDGAKCDISRLQVLFGSNVTIAVQDPSYPAYVDSSVIMGQTDLYQQDVQKYGNIEYMRCNPENGFFPDLSTVPRTDIIFFCSPNNPTGAAASRDQLTKLVKFAKDNGSIIVYDSAYAMYISDDSPKSIFEIPGAKEVAIETASFSKYAGFTGVRLGWTVVPKELLFSDGHPVAKDFNRIVCTCFNGASNIAQAGGLACLSTEGLKAMRDVVGFYKENTEIIVDTFTSLGFNVYGAKNAPYVWVHFPDRKSWDVFAEILEKANVVTTPGSGFGPGGEGFVRVSAFGHRENIIEAARRLKHMYK

SEQ ID NO: 665 - DNA, 1612 bp, Triticum aestivum
  misc_feature 1..1612: note = Ceres Clone ID no. 618639
  misc_feature 1..1612: note = Encodes the peptide sequence at SEQ ID NO. 666
  source 1..1612: mol_type = unassigned DNA
actgatttccccctccacctatctacccgccgccgccacgcccgccgccgacgacgatggcaactaccgcctcaccctccaccacgaccaccccccggtccttcctctcgtcgccttccttctccctcagggcatcgaagtcgagccacctccggacgacgagaaggctgcccgttaatgtacgctgcgccagtagctctccggccgccgatacatcttacacgacgaaggtctcgcggaatgccaacatagccaagctccaagcaggctatttgtttccggagattgccagaagaagggcagctcatctgctaaagcatcctgacgccaaaattataagtctgggaataggtgacactactgagcccattccggaggtcataacaaatgccatggcagagagagcacatgctttatccacagtggatggctacagtggttatggagctgaacaaggtgaaaagaaactaagggcagcaattgctgcaacctactatgcggatcttggtattgacgaaactgatatatttgtctctgatggtgccaaatgtgacatttctcgcctacaggttctttttggatctaaagtgaagattgcagttcaagatccatcatatcccgcatatgttgattcaagtgttatcatggggcaaactgacttatatcagcaggatgttcagaagtatggaaatattgaatacatgagatgcagtcctgaaaatggatttttccctgatctttccaaggtcccacggacagatatcatattcttctgttcacccaacaatcctactggtgctgctgcatctagggaccagctaacacagttggtcaaattcgcaaaggacaatgggtccataatagtctatgattctgcttatgccatgtacatatcagatgacagcccaaaatccatctttgaaattcctggggcgaaggaggttgccctcgagacagcatctttctctaaatatgctgggttcactggtgtccgactgggttggactgtggtccctaaggagctccttttctccgatgggcatccagtcgctaaagatttcaaccgcatagtctgcacttccttcaatggcgcatcgaccatctctcaggccggtggtttaggctgcctctctccagagggtctaaaggctatgcaagacgttgtcggattctacaaggagaacaccaaaatcattgtcgacacgtttgagtcgctcggattcaacgtctacggtgcgaagaatgccccctatgtgtgggtgcacttccctgaccgcaattcctgggatgtctttgccgagatccttgagaaggcaaacgtggtcactactcccggcagtggatttgggcccggcggtgagggctttgtgagggtcagtgcatttggccacagagagaacattattgaagctgcgagaagactgaagcagctatacaaatgagcgttggtttagcaggtggccccctctgtcgctggggagccaggcaataagaacccagcagcatttggagcacgaggtttgcttctcggctgctgggaagtgttagaatagagacagggtgttgtttttgctccattcgtaaccatttaatactggaaatttgcttgttc

SEQ ID NO: 666 - protein, 461 aa, Triticum aestivum
  REGION 91..456: note = Pfam Name: Aminotran_1_2 Pfam Description: Aminotransferase class I and II
  REGION 1..461: note = Ceres Clone ID no. 618639
  REGION 1..461: note = Bit score of 1169.6 for HMM based on sequences of Figure 5
  REGION 1..461: note = Functional Homolog Of SEQ ID NO. 645
MATTASPSTTTTPRSFLSSPSFSLRASKSSHLRTTRRLPVNVRCASSSPAADTSYTTKVSRNANIAKLQAGYLFPEIARRRAAHLLKHPDAKIISLGIGDTTEPIPEVITNAMAERAHALSTVDGYSGYGAEQGEKKLRAAIAATYYADLGIDETDIFVSDGAKCDISRLQVLFGSKVKIAVQDPSYPAYVDSSVIMGQTDLYQQDVQKYGNIEYMRCSPENGFFPDLSKVPRTDIIFFCSPNNPTGAAASRDQLTQLVKFAKDNGSIIVYDSAYAMYISDDSPKSIFEIPGAKEVALETASFSKYAGFTGVRLGWTVVPKELLFSDGHPVAKDFNRIVCTSFNGASTISQAGGLGCLSPEGLKAMQDVVGFYKENTKIIVDTFESLGFNVYGAKNAPYVWVHFPDRNSWDVFAEILEKANVVTTPGSGFGPGGEGFVRVSAFGHRENIIEAARRLKQLYK

SEQ ID NO: 667 - protein, 461 aa, Populus balsamifera
  REGION 91..456: note = Pfam Name: Aminotran_1_2 Pfam Description: Aminotransferase class I and II
  REGION 1..461: note = Public GI ID no. 118483001
  REGION 1..461: note = Bit score of 1195.3 for HMM based on sequences of Figure 5
  REGION 1..461: note = Functional Homolog Of SEQ ID NO. 645
  source 1..461: note = Populus balsamifera subsp. trichocarpa
MSPTQLLSTSISSSSSAFLAAPIAFKARNQNVSIASKTPSICTCAAAPQEQKTVYKTQVSRNANIAKLQAGYLFPEVARRRNAHMLKYPDAKVISLGIGDTTEPIPEVITSAIAKRAEALSTLEGYGGYGPEQGEKPLRTAIASTFYSGLGIEEDDIFVSDGAKCDISRLQMVFGANVTMAVQDPSYPAYVDSSVIMGQTGQFQKDIEKYGKIEYMRCTPENGFFPDLSKVSRTDIIFFCSPNNPTGSAATREQLTQLVQFAKDNGSIIVYDSAYAMYMSDDNPRSIFEIPGAKEVALETSSFSKYAGFTGVRLGWTVVPKQLLYSDGFPVVKDFNRVVCTSFNGASNICQAGGRACLSPEGLKAMSEVIGFYKENSNIIMDTFNSLGFNVYGGKNAPYVWVHFPGQSSWDVFSEILEKTHVVTTPGSGFGPGGEGFVRVSAFGHRENVLEACRRFKQLYN

SEQ ID NO: 668 - DNA, 1582 bp, Arabidopsis thaliana
  misc_feature 1..1582: note = Ceres Clone ID no. 38404
  misc_feature 1..1582: note = Encodes the peptide sequence at SEQ ID NO. 669
  source 1..1582: mol_type = unassigned DNA
aggttcatttgctctgcaaatttgtctgaaaaaatctttgtgcgaatcaggaaaaatgtcgtcgacccatcagttagtttcttcgatgatctcttcttcctcatccactttcttagccccttcaaattttaatctcagaactcgaaatgcttgcttacccatggcaaaacgggtcaatacttgcaaatgtgttgctacgccgcaagagaagatcgagtataagaccaaagtgtcacggaattcaaacatgtccaaacttcaggctggatacctattcccggagattgcaagaagaaggtctgcacacttgttgaaatatccagatgcacaagttataagtcttggaataggcgacacaactgagccaattcctgaagtgatcacttctgctatggcaaagaaagctcatgagttgtcaacaatagagggatatagtggttatggtgctgaacaaggtgcaaagccactgagagctgctattgcgaaaacattctacggtggccttggcataggggatgatgacgtttttgtttctgatggagctaaatgtgatatctcacgtctccaggttatgtttggttccaatgttacaattgctgttcaggatccttcatatccggcttatgtggactccagtgttattatgggtcagactgggcaatttaacactgatgtgcaaaagtatggaaacatcgagtacatgagatgcactccagagaatggcttctttcccgacttgtccaccgttggcgggacagatataattttcttctgttccccaaataaccctacgggtgctgctgccacgagagagcaactaacgcagttagttgagtttgcaaagaagaacggttctataatagtgtatgattccgcctatgcaatgtacatgtctgatgataacccacgatccatcttcgaaatccctggagcagaggaggtcgctatggagacagcttcgttcagcaaatatgctggtttcactggagttcgacttggttggactgtcatcccgaaaaagctactctattcagacggtttccctgttgccaaagacttcaatcggattatctgcacttgtttcaatggtgcatctaatatctctcaagctggtgctcttgcttgccttacacccgaaggacttgaggcaatgcataaggtgattggattctataaagaaaacacaaacataatcattgacacattcacatctctcgggtatgatgtatatggaggaaagaatgcgccttacgtatgggttcacttcccgaaccaaagctcatgggatgtgtttgctgagattctggagaagactcatgtggttacaactccaggaagtgggtttggaccagggggtgaagggttcgttcgtgtcagtgcctttggtcacagagagaacatcttagaggcatgtcgaagattcaagcagctttacaaatgaagaaccttgtttgtaatcgttcctcatcatcatcaccctctttaatgacatgatttgagttaaaataatgtcgtttccattgttttctggaatttgtagaagacacttttgacaccagtgtttcaagcaatttggcaaagc

SEQ ID NO: 669 - protein, 461 aa, Arabidopsis thaliana
  REGION 91..456: note = Pfam Name: Aminotran_1_2 Pfam Description: Aminotransferase class I and II
  REGION 1..461: note = Ceres Clone ID no. 38404
  REGION 1..461: note = Bit score of 1204.4 for HMM based on sequences of Figure 5
  REGION 1..461: note = Functional Homolog Of SEQ ID NO. 645
MSSTHQLVSSMISSSSSTFLAPSNFNLRTRNACLPMAKRVNTCKCVATPQEKIEYKTKVSRNSNMSKLQAGYLFPEIARRRSAHLLKYPDAQVISLGIGDTTEPIPEVITSAMAKKAHELSTIEGYSGYGAEQGAKPLRAAIAKTFYGGLGIGDDDVFVSDGAKCDISRLQVMFGSNVTIAVQDPSYPAYVDSSVIMGQTGQFNTDVQKYGNIEYMRCTPENGFFPDLSTVGGTDIIFFCSPNNPTGAAATREQLTQLVEFAKKNGSIIVYDSAYAMYMSDDNPRSIFEIPGAEEVAMETASFSKYAGFTGVRLGWTVIPKKLLYSDGFPVAKDFNRIICTCFNGASNISQAGALACLTPEGLEAMHKVIGFYKENTNIIIDTFTSLGYDVYGGKNAPYVWVHFPNQSSWDVFAEILEKTHVVTTPGSGFGPGGEGFVRVSAFGHRENILEACRRFKQLYK

SEQ ID NO: 670 - protein, 426 aa, Arabidopsis thaliana
  REGION 56..421: note = Pfam Name: Aminotran_1_2 Pfam Description: Aminotransferase class I and II
  REGION 1..426: note = Public GI ID no. 3549670
  REGION 1..426: note = Bit score of 1114.7 for HMM based on sequences of Figure 5
  REGION 1..426: note = Functional Homolog Of SEQ ID NO. 645
MAKRVNTCKCVATPQEKIEYKTKVSRNSNMSKLQAGYLFPEIARRRSAHLLKYPDAQVISLGIGDTTEPIPEVITSAMAKKAHELSTIEGYSGYGAEQGAKPLRAAIAKTFYGGLGIGDDDVFVSDGAKCDISRLQVMFGSNVTIAVQDPSYPAYVDSSVIMGQTGQFNTDVQKYGNIEYMRCTPENGFFPDLSTVGRTDIIFFCSPNNPTGAAATREQLTQLVEFAKKNGSIIVYDSAYAMYMSDDNPRSIFEIPGAEEVAMETASFSKYAGFTGVRLGWTVIPKKLLYSDGFPVAKDFNRIICTCFNGASNISQAGALACLTPEGLEAMHKVIGFYKENTNIIIDTFTSLGYDVYGGKNAPYVWVHFPNQSSWDVFAEILEKTHVVTTPGSGFGPGGEGFVRVSAFGHRENILEACRRFKQLYK

SEQ ID NO: 671 - protein, 464 aa, Oryza sativa
  REGION 94..459: note = Pfam Name: Aminotran_1_2 Pfam Description: Aminotransferase class I and II
  REGION 1..464: note = Public GI ID no. 37703720
  REGION 1..464: note = Bit score of 1198.2 for HMM based on sequences of Figure 5
  REGION 1..464: note = Functional Homolog Of SEQ ID NO. 645
  source 1..464: note = Oryza sativa subsp. japonica
MAASPAAAAAAATVSSFVSPSSFSSVKASKPDRLRPARRAAAVNVRCVSSPPATETSFKTKVPRNANMAKLQAGYLFPEIARRRAAHLLKFPDAKIISLGIGDTTEPIPDVITNAMAERAHALSTVDGYSGYGAEQGEKKLRAAIAATYYADLGIEETDIFVSDGAKCDISRLQVLFGSNVKIAVQDPSYPAYVDSSVIMGQTGLYQEDVQKYGNIEYMKCSPENGFFPDLSSVPRTDIIFFCSPNNPTGAAASRDQLTKLVKFAKDNGSIIVYDSAYAMYISDDSPKSIFEIPGAKEVAIETASFSKYAGFTGVRLGWTVVPKELLFSDGHPVAKDFNRIVCTCFNGASNISQAGGLGCLSPEGLKAMSDVVGFYKENTKIIVDTFTSLGFNVYGAKNAPYVWVHFPGRNSWDVFAEILEKAHVVTTPGSGFGPGGEGFVRVSAFGHRENIIEAARRLKQLYK

SEQ ID NO: 672 - protein, 432 aa, Arabidopsis thaliana
  REGION 56..421: note = Pfam Name: Aminotran_1_2 Pfam Description: Aminotransferase class I and II
  REGION 1..432: note = Public GI ID no. 152149571
  REGION 1..432: note = Bit score of 1077.2 for HMM based on sequences of Figure 5
  REGION 1..432: note = Functional Homolog Of SEQ ID NO. 645
  UNSURE 30: note = X is any aa, unknown, or other
  UNSURE 78: note = X is any aa, unknown, or other
  UNSURE 138: note = X is any aa, unknown, or other
  UNSURE 162: note = X is any aa, unknown, or other
  UNSURE 181: note = X is any aa, unknown, or other
  UNSURE 242: note = X is any aa, unknown, or other
  UNSURE 244: note = X is any aa, unknown, or other
  UNSURE 263: note = X is any aa, unknown, or other
  UNSURE 331: note = X is any aa, unknown, or other
MAKRVNTCKCVATPQEKIEYKTKVSRNSNXSKLQAGYLFPEIARRRSAHLLKYPDAQVISLGIGDTTEPIPEVITSAXAKKAHELSTIEGYSGYGAEQGAKPLRAAIAKTFYGGLGIGDDDVFVSDGAKCDISRLQVXFGSNVTIAVQDPSYPAYVDSSVIXGQTGQFNTDVQKYGNIEYXRCTPENGFFPDLSTVGRTDIIFFCSPNNPTGAAATREQLTQLVEFAKKNGSIIVYDSAYAXYXSDDNPRSIFEIPGAEEVAXETASFSKYAGFTGVRLGWTVIPKKLLYSDGFPVAKDFNRIICTCFNGASNISQAGALACLTPEGLEAXHKVIGFYKENTNIIIDTFTSLGYDVYGGKNAPYVWVHFPNQSSWDVFAEILEKTHVVTTPGSGFGPGGEGFVRVSAFGHRENILEACRRFKQLYKHHHHHH

SEQ ID NO: 673 - protein, 439 aa, Oryza sativa
  REGION 69..434: note = Pfam Name: Aminotran_1_2 Pfam Description: Aminotransferase class I and II
  REGION 1..439: note = Public GI ID no. 125603687
  REGION 1..439: note = Bit score of 1136.6 for HMM based on sequences of Figure 5
  REGION 1..439: note = Functional Homolog Of SEQ ID NO. 645
  source 1..439: note = Oryza sativa subsp. japonica
MAASPAAGAAAATVSSFVSPSSFSSVNFRFEAFKTKVPRNANMAKLQAGYLFPEIARRRAAHLLKFPDAKIISLGIGDTTEPIPDVITNAMAKRAHALSTVDGYSGYGAEQGEKKLRAAIAATYYADLGIEETDIFVSDGAKCDISRLQVLFGSNVKIAVQDPSYPAYVDSSVIMGQTGLYQEDVQKYGNIEYMKCSPENGFFPDLSSVPRTDIIFFCSPNNPTGAAASRDQLTKLVKFAKDNGSIIVYDSAYAMYISDDSPKSIFEIPGAKEVAIETASFSKYAGFTGVRLGWTVVPKELLFSDGHPVAKDFNRIVCTCFNGASNISQAGGLGCLSPEGLKAMSDVVGFYKENTKIIVDTFTSLGFNVYGAKNAPYVWVHFPGRNSWDVFAEILEKAHVVTTPGSGFGPGGEGFVRVSAFGHRENIIEAARRLKQLYK

SEQ ID NO: 674 - protein, 397 aa, Oryza sativa
  REGION 27..392: note = Pfam Name: Aminotran_1_2 Pfam Description: Aminotransferase class I and II
  REGION 1..397: note = Public GI ID no. 108707679
  REGION 1..397: note = Bit score of 1033.3 for HMM based on sequences of Figure 5
  REGION 1..397: note = Functional Homolog Of SEQ ID NO. 645
  source 1..397: note = Oryza sativa subsp. japonica
MAKLQAGYLFPEIARRRAAHLLKFPDAKIISLGIGDTTEPIPDVITNAMAKRAHALSTVDGYSGYGAEQGEKKLRAAIAATYYADLGIEETDIFVSDGAKCDISRLQVLFGSNVKIAVQDPSYPAYVDSSVIMGQTGLYQEDVQKYGNIEYMKCSPENGFFPDLSSVPRTDIIFFCSPNNPTGAAASRDQLTKLVKFAKDNGSIIVYDSAYAMYISDDSPKSIFEIPGAKEVAIETASFSKYAGFTGVRLGWTVVPKELLFSDGHPVAKDFNRIVCTCFNGASNISQAGGLGCLSPEGLKAMSDVVGFYKENTKIIVDTFTSLGFNVYGAKNAPYVWVHFPGRNSWDVFAEILEKAHVVTTPGSGFGPGGEGFVRVSAFGHRENIIEAARRLKQLYK

SEQ ID NO: 675 - protein, 419 aa, Vitis vinifera
  REGION 49..414: note = Pfam Name: Aminotran_1_2 Pfam Description: Aminotransferase class I and II
  REGION 1..419: note = Public GI ID no. 157352390
  REGION 1..419: note = Bit score of 830.2 for HMM based on sequences of Figure 5
  REGION 1..419: note = Functional Homolog Of SEQ ID NO. 645
MSATAKCMQMAGVCTRVTRNLNMEKLRNGYLFPEIAMRELEHMKKYPNAKVISLGIGDTTEPIPDIVTSSMANHARRLSTVEGYRGYGAEQGNKALRKAIAETLYGDLPIKDTEIFVSDGSQCDISRLQLLLGSNVTIAVQDPTFPAYIDSSVIIGQTGDFQDETGKYQNIKYMPCRPQNNFFPDLTTTATTDVIFICSPNNPTGHAASRKQLEQLVEFARANRSIIIFDSAYAAYVTDESPRSIFEIPGAREVAIEISSFSKFAGFTGVRLGWTVVPDELLFSNGFPVIKDYNRIVCTCFNGASSIAQAGGLACLSSDGLMVMQSVVDYYKENAKILGDTFTSLGLDVYGGINAPYAWVHFPGMKSWDVFTELLEKTHIITVPGCGFGPGGEEHIRVSAFGHRECILEASRRLKSLLS

SEQ ID NO: 676 - protein, 441 aa, Chlamydomonas reinhardtii
  REGION 69..433: note = Pfam Name: Aminotran_1_2 Pfam Description: Aminotransferase class I and II
  REGION 1..441: note = Public GI ID no. 159469820
  REGION 1..441: note = Bit score of 829.9 for HMM based on sequences of Figure 5
  REGION 1..441: note = Functional Homolog Of SEQ ID NO. 645
MQLNVRSTASGARSSTRSRRMTAVVQAVAQRAGTIDVQRNENFGKLRAGYLFPEIARRRKAHQEKNPDAKIISLGIGDTTEPLPKYIADAMAKAAAGLATREGYSGYGAEQGQGALREAVASTFYGHAGRAADEIFISDGSKCDIARIQMMFGSKPTVAVQDPSYPVYVDTSVMMGMTGDHNGTGFDGIEYMVCNPDNHFFPDLSKAKRTDIIFFCSPNNPTGAAATRAQLTELVNFARKNGSILVYDAAYALYISNPDCPKTIYEIPGADEVAIETCSFSKYAGFTGVRLGWTVVPKALKYANGEPVHADWNRVMTTCFNGASNIVQAGGLACLQPEGLKEMNAMIKFYKENAQILKTTFTEMGFSVYGGDDAPYIWVGFPGKPSWDVFAEILERCNIVTTPGSGFGPAGEGFVRASAFGSRENILEAVRRFKEAYGKRN

SEQ ID NO: 677 - protein, 402 aa, Ostreococcus sp.
  REGION 27..396: note = Pfam Name: Aminotran_1_2 Pfam Description: Aminotransferase class I and II
  REGION 1..402: note = Public GI ID no. 145344081
  REGION 1..402: note = Bit score of 639.3 for HMM based on sequences of Figure 5
  REGION 1..402: note = Functional Homolog Of SEQ ID NO. 645
  source 1..402: note = Ostreococcus lucimarinus CCE9901
MAQLKAGYLFPEIARIRNAHLEKNPDAKIISLGIGDTTEPIPKPITDGMVAAAAALGTKEGYSAKGGYGPEAGQMELRKTIAEKLYKGTPITYEDVFASDGSKCDISRMLQMFGSGRKIAVQDPSYPAYVDSSVIMGHSTGFNDAVKQYENITYMPCGAENDFFPDLSAAKSAELIFFCSPNNPTGAAATRAQLTELVNQALESGSIIIYDAAYSAFVGNPDCPKTIYEIPGAEKCAIETCSFSKYAGFTGLRLGWTVFPEALKFSDGSSVRQDWTRMMGTSFNGASTVAQGAGLACLTDAGLAAMGDMVAFYKENAAILKRTWEEMGYKVYGGTDAPYVWVSFEGRDSWEVFTEILDKTDIVTTPGAGFGPAGNGYVRCSAFGSRENINEAARRLKESFSK

SEQ ID NO: 678 - DNA, 708 bp, Oryza sativa
  misc_feature 1..708: note = Antisense of Os01g58420 relative to construct 5' to 3'
  source 1..708: mol_type = unassigned DNA; note = Oryza sativa subsp. japonica
ctagttctctaccggcggcggccggttcagatccagatcgaaagctgccgccttgttcgccgtaaccgctggaggtgacggcgcgagatcaaccaccgacgaggagtcggagtcactttgtgcaaccgccgccacggtgaccggcggtgcaagcttcatcatacggtatccagcctcagctgcggcagccgctgcagcctgctcatagaaaaagtaaggatgcgttgctggacgtgcaacgggatatcctctgaaaggaaagcgaacgccggtgccggcgactgcagtcacagcagccgcgcggtggaacaaatccaagtccagagtcggcggcagaggcatggcccgcataggcgtctgaaccccgccgccaccggtgtctaccgtgctattgctgctggggctgccgccacagccgaccatcgactgtgatgcaaacggaaagtttgtttttgccttggcaccccggaactctcgagcggcggcgtcgtaggcgcgggcggcctcctctgccgtgtcgtaggtaccgagccacacccggctcttcttggcagggtcacggatctccgctgcgtaacgcccccacgggcgcttgcggacgcccctgtagtgaggacccccggctccgacacctccgccgacgccaagaccaagcccggtgggtggcgccacagcaaccttctccaccgtagctgctctgggcgccat

SEQ ID NO: 679 - DNA, 495 bp, Arabidopsis thaliana
  misc_feature 1..495: note = Ceres Annot ID no. 832857
  misc_feature 1..495: note = Ceres Locus ID no. AT1G16910
  misc_feature 1..495: note = Encodes the peptide sequence at SEQ ID NO. 243
  source 1..495: mol_type = unassigned DNA
atgacgagtacaaacacgagaaacaaaggcaaatgcatagtagaaggaccaccaccgactctaagccgttatgagtcacaaaaaagccgcgactggaacacgttttgccagtatctcatgaccaagatgccaccagttcacgtatgggagtgtgaatcaaaccacatcctcgatttcctccaaagtcgtgaccagtttggtaaaacaaaagttcatatccaaggatgcgttttcttcggacagaaagagccaccaggagagtgtaactgcccgttgaaacaggcgtggggaagcttagatgctttgatcggacggctgagagcagcttacgaggagaacggtggcttaacggagaaaaacccgtttgcccggggagggattaggatttttctgagggaagtgagaggttcacaggcgaaggcgagaggagttttgtacaaaaaaaagaagcgtcttgtagttgttggtacgggaactagtactacttggacttaa

SEQ ID NO: 680 - DNA, 1003 bp, Arabidopsis thaliana
  misc_feature 1..1003: note = Ceres Annot ID no. 870022
  misc_feature 1..1003: note = Ceres Locus ID no. AT1G78815
  misc_feature 1..1003: note = Encodes the peptide sequence at SEQ ID NO. 244
  source 1..1003: mol_type = unassigned DNA
aagaccaaaagaaaaaaaaaaactttttcttttctgatgaatcgtatctattagctatgagcctgaggtgatgatcatgtcaacataaccatcaacgttctaccatggctagtcatagcaacaaaggcaaaggcatagcagaaggatcgtctcaaccgcaatcgcaaccgcaaccacaaccacaccaaccgcaatcacctcctaacccgccagcgttaagccggtacgagtcacagaaacgacgagactggaacacgttttgtcaatacctgcgtaaccaacagccaccggttcacatctcgcagtgtggatcaaaccacatcctcgatttcctccaatatctcgaccagtttgggaagacaaaggttcatatccatggatgcgttttcttcggacaggttgagccagcgggacagtgtaactgtcctttaaaacaagcgtgggggagtttagatgctttgatcggacggctaagagcggctttcgaggagaacggaggattgccggagagaaacccttttgccggcggcggaattagggtttttctgagggaagtgagagattcacaggcgaaggcaagaggagttccgtacaagaaaagaaaaaagaggaagaagaggaatcctatgaagagtcatgatggtgaagatggtactacgggaactagtagtagctccaacttggcttcttagcggaagcaaacaaaaaatctataataaaacaaagtggaattagttaatggtaagcatttaatactctccataatctctattaattttcagtactttaatcctattttgtgatctatttacaattttacatatagagtgaaaagaaacaattctacattcgtttcttgatagtcagctcttaatgcatagttgaattttatacgtatcatacccaaactataagattaatcttgatcttagatcatatacatatatcatcatggtgtgtaccctaagtttcataatcatttttcttaactatttatgtggat

SEQ ID NO: 681 - DNA, 660 bp, Arabidopsis thaliana
  misc_feature 1..660: note = Ceres Annot ID no. 828846
  misc_feature 1..660: note = Ceres Locus ID no. AT2G31160
  misc_feature 1..660: note = Encodes the peptide sequence at SEQ ID NO. 245
  source 1..660: mol_type = unassigned DNA
atggatatgattccccaattgatggaaggctcttcagcttacggaggtgtcacaaacctcaacatcatctcaaacaactcctcctccgtcaccggagccaccggaggtgaagcaacgcaaccactgtcttcctcctcctcaccatcggcgaactcaagccgttacgagaaccagaagaggagagactggaacacgttcggacagtacttaaggaaccatcggccaccgctttcgctttcccgatgcagtggagctcacgtgctcgagttcctccgttacttggaccagttcggtaagacaaaagtccacacgaacatttgtcacttctatggccatcctaatcctccggcaccgtgtccgtgtcctctccgacaagcttggggaagtcttgacgctcttatcggtcgtcttcgagctgcctttgaggaaaacggaggcaagcctgagacgaatccttttggagctcgtgccgttaggctttatctaagggaagttagagatatgcagagtaaagctagaggtgttagctacgagaagaagaagcgaaagcgtcctcttccttcgtcgtcgacttcttcttcctccgccgtagctagccaccagcaatttcaaatgctaccgggtactagttctactactcaattaaagtttgagaagtaa

SEQ ID NO: 682 - DNA, 907 bp, Arabidopsis thaliana
  misc_feature 1..907: note = Ceres Annot ID no. 861920
  misc_feature 1..907: note = Ceres Locus ID no. AT2G42610
  misc_feature 1..907: note = Encodes the peptide sequence at SEQ ID NO. 246
  source 1..907: mol_type = unassigned DNA
attacataattcttcagatccataaaacaaattgatcccttaaccttcttcaccaacatctctcttacactcaacaagagatcatatcatgtcctctccaagagaaagaggaaagagtttgatggaatcatcaggatcagagccaccggtgacaccaagccgttacgagtcgcagaagagacgtgactggaacactttcggacagtacttgaagaatcagagaccgcctgtgccgatgtctcactgcagctgtaaccacgtgcttgatttcctcaggtacttagaccagttcggtaagacaaaggtgcacgtgcctggctgtatgttctacggccagcctgagccaccagctccttgcacgtgccctctcagacaagcttggggaagtcttgacgctttgatcggacggctgagagcggcttacgaggagaacggtggacctccggagactaaccctttcgctagcggagcgataagggtttatctgagggaggttagggagtgtcaggctaaggctagagggattccttacaagaagaagaagaagaagaagccaacgccggagatgggaggtgggagagaggactcttcttcctcctcctcttccttcagcttctcttaagagattctccatcgtcgtgaaagactttgtggatcagtaagtctcaaagagggatcaaatgtaaaagagacctcaaatctatctactggtatcttcaacatatctttcgggaccatttttgcagctcttcgtcccctcctcttcatttccgcagatctccgtcgtcataaatatcttcatctattctcttattaagctctattcatatttattctcttattaagcacttttcttttgaataaagtaagtgtaaagagtttatatattgaattcaggtgtgttttg

SEQ ID NO: 683 - DNA, 606 bp, Arabidopsis thaliana
  misc_feature 1..606: note = Ceres Annot ID no. 839537
  misc_feature 1..606: note = Ceres Locus ID no. AT3G04510
  misc_feature 1..606: note = Encodes the peptide sequence at SEQ ID NO. 247
  source 1..606: mol_type = unassigned DNA
atggatttgatctctcaaaaccacaacaacagaaaccctaataccagtctctcgacgcaaaccccttcttccttttcttctccaccttcctctagccgctacgagaaccagaaacgccgtgactggaacactttctgccaatacctcagaaaccaccatccaccgctctctctagcttcttgcagtggcgcacacgtcctcgattttctgcgttaccttgaccaattcggcaaaaccaaagtccaccaccaaaactgcgccttctttggcctcccaaatccaccggctccttgtccttgtcctctccgacaagcctggggctcactcgacgccctcattggtcgtctccgtgcagcctacgaggagaacggtggcgctcccgagactagcccttttggctcacggtccgtcaggattttcctcagggaggttagagatttccaggctaagtcacgtggtgttagctatgagaagaagaggaaaagggtcaacaacaagcaaataactcagtcccaaccacagtcccaaccgcctttaccccagcagccacagcaggagcaaggtcagtctatgatggctaattaccaccacggtgcaactcaataa

SEQ ID NO: 684 - DNA, 588 bp, Arabidopsis thaliana
  misc_feature 1..588: note = Ceres Annot ID no. 8755109
  misc_feature 1..588: note = Ceres Locus ID no. AT3G23290
  misc_feature 1..588: note = Encodes the peptide sequence at SEQ ID NO. 248
  source 1..588: mol_type = unassigned DNA
atggatcatatcatcggctttatgggcacaacaaacatgtcacataacacaaaccttatgatcgctgccgcagccactaccactacgacctcttcgtcttcctcttcgtcctccggaggctcggggactaaccagctaagcaggtacgagaatcagaagagaagagattggaacactttcggacagtatctacgcaatcaccgtccaccactttctctctcccgttgcagtggtgctcatgttcttgaattcctcaggtacctcgaccaattcggcaagactaaggttcacacacacctatgtccgttcttcggacacccaaacccaccagcaccatgtgcctgtccactccgacaagcgtggggtagtctggacgcactcattggccgtcttagagctgcttttgaagagaacggtggttcaccagagacgaacccttttggtgcacgagccgttcgactctacctaagggaagtacgtgactcgcaggctaaagcacgtgggatcagctatgaaaaaaagaagcgcaagcgacctcctccgccactaccaccggctcagccggcgatttcaagtagccctaattaa

SEQ ID NO: 685 - DNA, 573 bp, Arabidopsis thaliana
  misc_feature 1..573: note = Ceres Annot ID no. 853637
  misc_feature 1..573: note = Ceres Locus ID no. AT5G28490
  misc_feature 1..573: note = Encodes the peptide sequence at SEQ ID NO. 249
  source 1..573: mol_type = unassigned DNA
atggatttgatctctcaccaaccaaacaagaaccctaattcctcaacacaactaacaccaccttcctcaagccggtacgagaaccaaaaacgccgtgactggaacactttctgtcaatacctccggaaccaccgtcctccgctctctctcccctcgtgtagcggcgcacacgtgctcgagttcctccgctaccttgaccagttcgggaaaacaaaagttcaccaccagaactgtgccttctttggcctccctaaccctcctgctccttgtccttgtcctctccggcaagcttggggctcactcgacgctcttatcggccgcctccgcgccgcctacgaggagaacggtggcccacctgaagctaacccatttggctcacgcgccgtcaggttattcctccgtgaagtcagagactttcaagccaaagctcgaggtgttagctatgagaagaagaggaagagagtcaacaggcagaaaccgcaaacgcagccgcctctacagcttcagcaacagcaacagcagccacaacaaggtcagtctatgatggctaattactcgggtgcaacagtatga

SEQ ID NO: 686 - DNA, 549 bp, Arabidopsis thaliana
  misc_feature 1..549: note = Ceres Annot ID no. 856813
  misc_feature 1..549: note = Ceres Locus ID no. AT5G58500
  misc_feature 1..549: note = Encodes the peptide sequence at SEQ ID NO. 250
  source 1..549: mol_type = unassigned DNA
atggagggagaaaccgcagccaaagcagcggcaagttcctcctcatccccgagccggtacgagtctcaaaagaggcgagactggaacactttccttcagtatctaaggaaccacaagccacctctgaatctgtctcgttgtagtggcgcacacgtccttgagttccttaagtacctcgaccagtttggtaagaccaaagtccatgccacggcttgtcccttcttcggacaacctaacccaccgtctcagtgcacttgccctctcaagcaagcttggggaagtctcgatgctctcatcggccgtctaagggctgctttcgaggaaatcggcggtggtcttcctgagtcaaaccctttcgctgccaaggctgttaggatctatcttaaagaagtccgtcaaacacaggctaaggctcgagggattccttacgacaagaagaaaagaaaacgtccgcatacagacacggcaactccaatcgccggtgacggagacgatgccgaaggaagtggtggtgctgctttggtcgttacggctgcaactacggtatag

SEQ ID NO: 687 - DNA, 815 bp, Arabidopsis thaliana
  misc_feature 1..815: note = Ceres Clone ID no. 28780
  misc_feature 1..815: note = Ceres Locus ID no. AT1G07090
  misc_feature 1..815: note = Encodes the peptide sequence at SEQ ID NO. 251
  source 1..815: mol_type = unassigned DNA
aactactaaacactaaattatcaatccgctctcttctcaaaaaaaaaaaatcgactctaaaatcaaactctctcaaagctccccaaaaaaaccctagttctgaatggaatcggcggattccggacgatccgatccggtaaaaggagacgacccgggtccatctttcgtctcttcaccaccagctacacctagcaggtatgagtcacagaagcgacgcgactggaacacgttcttgcagtacctcaagaaccacaagccgcctctcgcgttgtcacggtgtagcggagcgcatgtgatcgagtttctcaagtacctcgaccagttcggtaagaccaaagtccacgtggcggcttgtccttacttcggccatcagcaacctccgtctccttgctcatgccctctcaagcaagcttggggatctctcgatgctttgatcggacggttgagagctgcctacgaggagaacggtggacggccggattctaacccgttcgccgcacgtgcggttcggatttacttgagggaagtcagagagagtcaggcaaaggctcgtgggattccttacgagaaaaagaaacggaaacggccgccaactgtcaccaccgttagagttgacgtcgcttcttcgagacaaagtgacggagacccttgtaacgtcggtgctccatctgttgccgaggccgtaccgccttagatcgaattatatataatattatagttttcttgattaatgatatatatatacttatctctatgtatgtatggaactcacttcatcttttgttccttagtacctaattattaaattttgttcc

SEQ ID NO: 688 - DNA, 1470 bp, Populus balsamifera
  misc_feature 1..1470: note = Ceres Annot ID no. 1461228
  misc_feature 1..1470: note = Encodes the peptide sequence at SEQ ID NO. 689
  source 1..1470: mol_type = unassigned DNA
atgtcgccgacgcaacttttatcgacttcgatttcttcttcttcctctgcttttttagccgcacctattgccttcaaagctagaaaccagaatgtttcgatcgcgtcgaaaacgccttctatttgcacgtgtgctgctgctcctcaagaacagaaaaccgtttacaaaacacaagtctcccgcaatgcaaatattgcaaagcttcaagctggttacttatttccagaggttgctcgaaggaggaatgcgcacatgctgaaataccctgatgcaaaagtgataagccttggaattggtgacactacagaacctatcccagaagttataacttctgcaatagcaaagagagcagaagcactgtctactttggagggttacagtggttatggacctgaacaaggtgaaaaacctttgagaactgcaattgcttcaacattttattcaggtcttgggatcgaggaggatgatatatttgtctctgatggtgccaaatgtgacatatctcgcctccagatggtatttggggcaaatgtaaccatggcagtgcaagatccatcatacccggcttacgttgattctagtgtcatcatgggccagactggacagtttcagaaagacgttgagaagtacggtaagattgaatacatgaggtgcactccagagaatggttttttccctgatttatccaaagtttctcgaacggatatcatatttttctgttcaccgaacaatcctactggttctgctgcaacaagggagcaactgacccaactagtacaatttgcaaaggacaatggatcaatcatcgtctatgattcagcatatgccatgtatatgtctgatgataacccacgatccatatttgaaattccgggagccaaagaggttgctttggagacatcatcttttagtaagtatgctgggtttactggagttcgtctggggtggactgttgttccaaaacagcttctatattctgatgggttcccagttgtaaaggatttcaaccgtgttgtttgcactagctttaatggggcatccaacatttgccaagctggtggtcgggcttgcctttcacctgaaggccttaaggcaatgagtgaggtgattggattctataaagaaaactccaacattataatggatacattcaattcgctcggttttaatgtatatggaggaaagaatgctccctatgtgtgggttcacttccctggccaaagctcgtgggatgttttcagtgaaattcttgagaaaactcatgtagttaccacacctgggagtggttttggacctggtggggaagtttggttagaccaccaaggcagaatattttctgaaaaaacagcaagcccgctcacaacaagctcggactctcgaaaggacaagatctccataaagcagggggagcaaccaagacagccttccagcgatgttagcaatgcaaatctttacacatcaagttggtaa

SEQ ID NO: 689 - protein, 429 aa, Populus balsamifera
  REGION 1..429: note = Ceres Annot ID no. 1461228
  REGION 1..429: note = Bit score of 1109.0 for HMM based on sequences of Figure 5
  REGION 1..429: note = Functional Homolog Of SEQ ID NO. 645
RNANIAKLQAGYLFPEVARRRNAHMLKYPDAKVISLGIGDTTEPIPEVITSAIAKRAEALSTLEGYSGYGPEQGEKPLRTAIASTFYSGLGIEEDDIFVSDGAKCDISRLQMVFGANVTMAVQDPSYPAYVDSSVIMGQTGQFQKDVEKYGKIEYMRCTPENGFFPDLSKVSRTDIIFFCSPNNPTGSAATREQLTQLVQFAKDNGSIIVYDSAYAMYMSDDNPRSIFEIPGAKEVALETSSFSKYAGFTGVRLGWTVVPKQLLYSDGFPVVKDFNRVVCTSFNGASNICQAGGRACLSPEGLKAMSEVIGFYKENSNIIMDTFNSLGFNVYGGKNAPYVWVHFPGQSSWDVFSEILEKTHVVTTPGSGFGPGGEVWLDHQGRIFSEKTASPLTTSSDSRKDKISIKQGEQPRQPSSDVSNANLYTSSW

SEQ ID NO: 690 - DNA, 819 bp, Arabidopsis thaliana
  misc_feature 1..819: note = Ceres Annot ID no. 827940
  misc_feature 1..819: note = Encodes the peptide sequence at SEQ ID NO. 691
  source 1..819: mol_type = unassigned DNA
atgtatgaaaacgggataagctttataatctctttacttatatgtggatgtgtgaagagtgaggagatgatgaagcaacatttcgtgctagtacatggttcgtgcctcggcgcgtggtgctggtacaaggtgaagccgctgctcgaggcttcgggccatcgtgtaaccgccttagacctagctgcttgtggtatagacacaaggtcgatcactgacatttccacatgcgaacaatattctgagccgttgattcagctaatgacttcattgccgaatgatgagaaggttgtgctcgtgggtcatagctatggaggtttgactttagccatagccatggataagtttcccgacaaaatctctgtctctgtcttcgtaacttctttcatgcccgacaccaaaaactcaccatcgttcgtcctggaaaagtttgcaagcaccatgacaccagaagattggatgggctctgagctcgagccgtatgtggtcttcagcgctgagttcacgaagcaccgtatcctccaactttctcctattgaagatcttgagcttagattgcttctaaagaggcctggttcattatttcttaatgatttatcgaggatgaagaacttttctgaaaaagggtatggatctgttcctcgagcttacattgtgagcaaagatgaccacaccatctcggaagaatatcaacgatggatgatcgataactatccgccgaatttagtgatagagatggaagggacggatcatttgccattgttttgcaaacctcaactactaagtgaccatctattggcaatcgccgacaaattctcttaa

SEQ ID NO: 691 - protein, 272 aa, Arabidopsis thaliana; identical to SEQ ID NO: 610
  REGION 53..266: note = Pfam Name: Abhydrolase_1 Pfam Description: alpha/beta hydrolase fold
  REGION 1..272: note = Ceres Annot ID no. 827940
  REGION 1..272: note = Bit score of 566.2 for HMM based on sequences of Figure 8
  REGION 1..272: note = Functional Homolog Of SEQ ID NO. 595

SEQ ID NO: 692 - DNA, 1743 bp, Sorghum bicolor; identical to SEQ ID NO: 535
  misc_feature 1..1743: note = Ceres Annot ID no. 6086224
  misc_feature 1..1743: note = Encodes the peptide sequence at SEQ ID NO. 693
  source 1..1743: mol_type = unassigned DNA

SEQ ID NO: 693 - protein, 520 aa, Sorghum bicolor
  REGION 103..499: note = Pfam Name: PTR2 Pfam Description: POT family
  REGION 1..520: note = Ceres Annot ID no. 6086224
  REGION 1..520: note = Bit score of 1335.6 for HMM based on sequences of Figure 11
  REGION 1..520: note = Functional Homolog Of SEQ ID NO. 426
VFLRRVLHQGNAEAANNISKWTGTVYIFSLIGAFLSDSYWGRYVTCAIFQIIYVTGLVILSLASWFLLVKPSGCGGVKVHCDEPSAPGVALFYLSTYMIAFGNGGYQPSIATFGSDQFDETDPKEGRSKVAFFSYFYLALNVGSLFSNTVLVYYEDSGRWVMGFWVSAAAAALALVLFLLGTPNYRHFKPSGNPLTRVAQVFVAAFRKWHAEVPRGELLHEVEGEDPKISGIRKILHSDELRFLDKAATITEGEKMENPWRLCTVTQVEEVKCILKMLPIWLCTIVYSVVFTQMASLFVEQGATMDTNIGSFHFPAASMSLFDVLSVLAFIAIYRRVLVPVMARLSGNPQGLTELQRMGVGLVIGMAAMVVAGVVEVERLKRVAAPDQPSSLSVLWQVPQYALIGASEVFMYVGQLEFFNGQAPDGVKSFGSALCMASISLGNYVSIMLVSVVTSLTAGEKRPGWIPGNLNSGHLDRFYFLLAALSLVDLAVYIACAMWYKGIKLDGGDGDDSRKVSAHV

SEQ ID NO: 694 - DNA, 1374 bp, Glycine max
  misc_feature 1..1374: note = Ceres Clone ID no. 476769
  misc_feature 1..1374: note = Encodes the peptide sequence at SEQ ID NO. 695
  source 1..1374: mol_type = unassigned DNA
agatcaatttgacgagaagaacgaaaaacaaaagaacgcgagagaagctttcttctcttatttttactttgccctcaatgttggatctctgttctccaacactatattagtatactacgaggattcaggaatgtggacaatgggtttcttggtgtccttggcctcagctgttattgccttagtttcatacttagcaggatatcgaaaatatagatatgtaaagggatatgggaatccggtgataagggtagttcaggtgtttgtggccactgttagaaagtggaaggttggtccagccaaggaactccaactttatgaggttgatggtccagaatctgccataaaagggagtagaaagattcatcacagcaatgattttagattcatggacaaggcagcaacaataacggagaaagatgcagttaatctcaagaatcactggcggctatgtactgtaactcaagttgaggaagccaaatgcgtactgagaatgctaccagtttggctatgtactataatttattcagttgtgtttacgcaaatggcttctctttttgtcgagcaaggggatgtgatgaacaacaagataggaaattttcacttgccagcagccagcatgtcagtgtttgatatctgcagtgtccttttatgcactggaatttatcgccaaatccttgttcctctagcaggaagatttagtggcaatcctaggggactaactgagcttcaaagaatgggagttggcctaattattggaatgttagctattcttgcagctggtgccacagagtttgaaaggctcaaacacattacacccggggaaaaggctagttctttgagtatattttggcaaatcccacagtatgttctagttggtgcttcagaagttttcatgtatgtgggtcaactggagttctttaatgggcaagccccagatggcataaaaagctttgggagctcactttgcatggcttcaatttctcttggaaactatgtgagtagcttgctggtgtacatggtgatgggaatcactgcaagaggcgagaatccgggatggattcccaataacttgaatgtggggcacatggataggtttttcttcctcgttgcagtgctaactgctcttgattttgtactctacttattatgtgctcgctggtacaagagcatcaaccttggagatggtgacatgggaagccaagaggacgaggaagtgatcagtaaagtttgattcagttgttttgaattttcatttccttgctaggaatttgtttatcttagtagttttaataaggctgttcaaggatgtcccttttggtgacacaaagcatgaccagttcaattgagagaggattgacaaaatattggtgggat

SEQ ID NO: 695 - protein, 366 aa, Glycine max
  REGION 1..283: note = Pfam Name: PTR2 Pfam Description: POT family
  REGION 1..366: note = Ceres Clone ID no. 476769
  REGION 1..366: note = Bit score of 498.5 for HMM based on sequences of Figure 11
  REGION 1..366: note = Functional Homolog Of SEQ ID NO. 426
MWTMGFLVSLASAVIALVSYLAGYRKYRYVKGYGNPVIRVVQVFVATVRKWKVGPAKELQLYEVDGPESAIKGSRKIHHSNDFRFMDKAATITEKDAVNLKNHWRLCTVTQVEEAKCVLRMLPVWLCTIIYSVVFTQMASLFVEQGDVMNNKIGNFHLPAASMSVFDICSVLLCTGIYRQILVPLAGRFSGNPRGLTELQRMGVGLIIGMLAILAAGATEFERLKHITPGEKASSLSIFWQIPQYVLVGASEVFMYVGQLEFFNGQAPDGIKSFGSSLCMASISLGNYVSSLLVYMVMGITARGENPGWIPNNLNVGHMDRFFFLVAVLTALDFVLYLLCARWYKSINLGDGDMGSQEDEEVISKV

SEQ ID NO: 696 - DNA, 1654 bp, Arabidopsis thaliana
  misc_feature 1..1654: note = Ceres Clone ID no. 15650
  misc_feature 1..1654: note = Encodes the peptide sequence at SEQ ID NO. 697
  source 1..1654: mol_type = unassigned DNA
attatagaatatctaataatgaagaatcggtttcaaaattaataatgactgattataattacattgacaacatgcagggactaataacaattacactcacagcatcgtttcctcaactccacccagcatcatgcaacagccaggacccactcagttgcggcggtccgaataagctccagatcggagttttgctattgggactctgtttcctctccgtagggagtggaggaatacgaccttgtagcatcccttttggggttgatcagtttgaccaacgaactgaggaaggggttaaaggagtggccagtttcttcaactggtattacatgactttcactgtggttctgatcattacgcagaccgtagttgtgtatatccaggatcaagtcagttggattatcggttttagtatccctaccggactcatggctcttgcggttgttatgttttttgccggaatgaagcgttatgtctacgttaaaccagaaggaagtatattctctgggatcgctcaagttatcgtggcagctcgtaagaagcgaaagctgaaacttccggcggaagatgacggcactgtcacctattacgacccagccatcaagtctagcgtgttatccaagttacaccgcagtaaccaattcaggtgtcttgacaaagccgcggtggttatagaaggtgacctaacacccgagggacctcccgcagacaagtggcggttatgcagcgtccaagaagtggaagaagtgaagtgtttgatccgaattgttcctatctggtcggccggaataatctcactcgcggccatgacaacacaaggcactttcacggtctctcaagctttgaaaatggatcgaaacttaggtcctaaattcgagattccggctggttcactctccgtcatctctctcctcacaatcggcatctttcttcccttctacgaccgcgtttttgtaccattcatgcggcgaatcaccggccataaatccggaatcacactcctccaaaggataggaacagggatcgttttcacgatcttttctatgatcgttgcgggcattgtggagcgtatgagacgcatacgctccatcaatgccggagatccaacgggaatgactccaatgtcggtgttttggctttcgccgcagctaattctcatgggactatgtgaagcattcaatatcatcggacaaattgagttcttcaacagtcagtttccagagcacatgagaagtatcgctaattctctcttctctttatcgttcgccggttcgagctaccttagtagtttccttgtgactgtcgttcataaattctccggtgggcatgatcgtccggattggctaaacaagaatctcaacgcgggaaaattggattacttctattatctgattgcggttttgggtgtggttaatctggtttacttttggtattgtgctcggggataccggtacaaggtcggtttaccgattgaagactttgaggaggacaagtcctccgatgatgttgagatgacttccaagaaatcgatggaatgatttaatagactatccttagggacaacaagaagattgtcgatgttgtttgaataattactatgacaatgtatgtatcataatatgtaagaactagaatatataataaatttttaccttcc

SEQ ID NO: 697 - protein, 496 aa, Arabidopsis thaliana
  REGION 13..406: note = Pfam Name: PTR2 Pfam Description: POT family
  REGION 1..496: note = Ceres Clone ID no. 15650
  REGION 1..496: note = Bit score of 341.4 for HMM based on sequences of Figure 11
  REGION 1..496: note = Functional Homolog Of SEQ ID NO. 426
MTDYNYIDNMQGLITITLTASFPQLHPASCNSQDPLSCGGPNKLQIGVLLLGLCFLSVGSGGIRPCSIPFGVDQFDQRTEEGVKGVASFFNWYYMTFTVVLIITQTVVVYIQDQVSWIIGFSIPTGLMALAVVMFFAGMKRYVYVKPEGSIFSGIAQVIVAARKKRKLKLPAEDDGTVTYYDPAIKSSVLSKLHRSNQFRCLDKAAVVIEGDLTPEGPPADKWRLCSVQEVEEVKCLIRIVPIWSAGIISLAAMTTQGTFTVSQALKMDRNLGPKFEIPAGSLSVISLLTIGIFLPFYDRVFVPFMRRITGHKSGITLLQRIGTGIVFTIFSMIVAGIVERMRRIRSINAGDPTGMTPMSVFWLSPQLILMGLCEAFNIIGQIEFFNSQFPEHMRSIANSLFSLSFAGSSYLSSFLVTVVHKFSGGHDRPDWLNKNLNAGKLDYFYYLIAVLGVVNLVYFWYCARGYRYKVGLPIEDFEEDKSSDDVEMTSKKSME

SEQ ID NO: 698 - protein, 4 aa, synthetic construct
  REGION 1..4: note = C-terminal sorting signal
KDEL

SEQ ID NO: 699 - skipped

SEQ ID NO: 700 - protein, 4 aa, synthetic construct
  REGION 1..4: note = C-terminal sorting signal
NPIR

SEQ ID NO: 701 - protein, 5 aa, synthetic construct
  REGION 1..5: note = C-terminal sorting signal
  VARIANT 3: note = Xaa = Any Amino Acid
LPXTG

1. (canceled)

2. A method of producing a plant, said method comprising growing a plant cell comprising an exogenous nucleic acid, said exogenous nucleic acid comprising a regulatory region operably linked to a nucleotide sequence,
wherein the nucleotide sequence comprises a polynucleotide sequence that has 85 percent or greater sequence identity to the nucleotide sequence of SEQ ID NO:76, or a fragment thereof, or
wherein the nucleotide sequence encodes a polypeptide comprising an amino acid sequence having 85 percent or greater sequence identity to the amino acid sequence of SEQ ID NO: 77, wherein a plant produced from said plant cell has a difference in the level of biomass as compared to the corresponding level of a control plant that does not comprise said nucleic acid.

3-15. (canceled)

16. The method of claim 2, wherein said polypeptide comprises the amino acid sequence of SEQ ID NO: 77.

17-18. (canceled)

19. A plant cell comprising an exogenous nucleic acid said exogenous nucleic acid comprising a regulatory region operably linked to a nucleotide sequence,
wherein the nucleotide sequence comprises a polynucleotide sequence that has 85 percent or greater sequence identity to the nucleotide sequence of SEQ ID NO:76, or a fragment thereof, or
wherein the nucleotide sequence encodes a polypeptide comprising an amino acid sequence having 85 percent or greater sequence identity to the amino acid sequence of SEQ ID NO: 77, wherein a plant produced from said plant cell has a difference in the level of biomass as compared to the corresponding level of a control plant that does not comprise said nucleic acid.

20. (canceled)

21. A transgenic plant comprising the plant cell of claim 19.

22. The transgenic plant of claim 21, wherein said plant is a member of a species selected from the group consisting of Panicum virgatum (switchgrass), Sorghum bicolor (sorghum, sudangrass), Miscanthus giganteus (miscanthus), Saccharum sp. (energycane), Populus balsamifera (poplar), Zea mays (corn), Glycine max (soybean), Brassica napus (canola), Triticum aestivum (wheat), Gossypium hirsutum (cotton), Oryza sativa (rice), Helianthus annuus (sunflower), Medicago sativa (alfalfa), Beta vulgaris (sugarbeet), or Pennisetum glaucum (pearl millet).

23. A transgenic plant comprising the plant cell of claim 19, wherein said polypeptide comprises an amino acid sequence that has 90% identity to the amino acid sequence of SEQ ID NO: 77.

24. A seed product comprising embryonic tissue from a transgenic plant according to claim 23.

25-42. (canceled)
